(19) United States
(12) Patent Application Publication
(10) Pub. No.: US 2024/0132993 A1
(43) Pub. Date: Apr. 25, 2024

(54) SYSTEMS AND METHODS FOR EXTRACTING RARE EARTH ELEMENTS WITH ENGINEERED MICROORGANISMS

(71) Applicant: Cornell University, Ithaca, NY (US)

(72) Inventors: Buz BARSTOW, Ithaca, NY (US); Alexa SCHMITZ, Ithaca, NY (US); Brooke PIAN, Ithaca, NY (US); Sean MEDIN, Ithaca, NY (US)

(21) Appl. No.: 18/547,434

(22) PCT Filed: Feb. 18, 2022
(86) PCT No.: PCT/US2022/017101

§ 371 Date: Aug. 21, 2023

Related U.S. Application Data
(60) Provisional application No. 63/220,475, filed on Jul. 10, 2021.
(60) Provisional application No. 63/152,798, filed on Feb. 23, 2021.

(51) Int. Cl. C22B 3/18; C12N 1/20; C12N 9/02; C12N 9/06; C12N 15/74; C22B 59/00

(52) U.S. Cl. CPC C22B 3/18; C12N 1/205; C12N 9/001; C12N 9/0026; C12N 15/74; C12Y 103/03011; C12Y 105/08004; C22B 59/00; C12R 2001/01

(57) ABSTRACT

Provided are modified bacteria for use in bioleaching rare earth elements (REEs). The modified bacteria contain at least one engineered genetic change that is correlated with improved bioleaching of the REEs, relative to REE bioleaching by unmodified bacteria of the same species as the modified bacteria. Also provided is a method for extracting REEs by contacting a composition containing REEs with biolixiviant produced by the modified bacteria. Kits that include containers that hold the modified bacteria are also provided.

### CROSS REFERENCE TO RELATED APPLICATIONS

[0001] This application claims priority to U.S. provisional application No. 63/220,475, filed Jul. 10, 2021, and to U.S. provisional application No. 63/152,798, filed Feb. 23, 2021, the disclosures of each of which are incorporated herein by reference.

### SEQUENCE LISTING

[0002] The instant application contains a Sequence Listing which has been submitted electronically in ASCII format and is hereby incorporated by reference in its entirety. Said ASCII copy, created on Feb. 17, 2022, is named 018617_01341_SL.txt and is 979,969 bytes in size.

### BACKGROUND

[0003] Rare earth elements (REE) are essential for the manufacturing of modern electronics, sustainable energy technologies including electric motors and wind turbine generators; solid state lighting; battery anodes; high-temperature superconductors; and high-strength lightweight alloys. All of these applications place increasing demands on the global REE supply chain. As the world demand for sustainable energy grows, finding a reliable and sustainable source of REE is critical.

[0004] Current methods for refining REE often involve harsh chemicals, high temperatures, high pressures and generate a considerable amount of toxic waste. These processes give sustainable energy technologies reliant on REE a high environmental and carbon footprint. As a consequence, due to its high environmental standards, the United States has no capacity to produce purified REE.

[0005] There is growing interest in biological methods to supplement, if not completely replace traditional REE extraction and purification methods. Bioleaching is used to extract 5% of the world's gold, and ≈15% of the world's copper supply, and biomining in Chile alone accounts for 10% of the world's Cu supply.

[0006] The performance of REE-bioleaching lags behind thermochemical processes. For example, while thermochemical methods have 89-98% REE extraction efficiency from monazite ore, Aspergillus species can only achieve≈3-5%. The acid-producing microbe Gluconobacter oxydans B58 can recover≈50% of REE from FCC catalysts. However, techno-economic analysis indicates that even this extraction efficiency is still not high enough for commercial viability.

[0007] Recent efforts to improve bioleaching have focused exclusively on process optimization. It is believed that no previous genetic approaches have yet been taken for any bioleaching microbe. With recent advances in tools for reading and writing genomes, genetic engineering is an attractive solution for enhancing bioleaching. However, applying these tools to non-model microorganisms like G. oxydans can be a significant challenge. While there have been some advances for editing the genome of G. oxydans it has remained unknown where the genome can be edited to improve bioleaching results. Thus, there is an ongoing and unmet need for improved compositions, engineered organisms, and methods for separating REEs from compositions that contain them. The present disclosure is pertinent to this need.

### BRIEF SUMMARY

[0008] The present disclosure provides a description of a whole genome knockout collection for Gluconobacter oxydans B58, and use of it to comprehensively characterize the genomics of rare earth elements (REEs) bioleaching. In total, 304 genes that notably alter production of G. oxydans' acidic bio-lixiviant, including 165 that make statistically significant changes, were identified. Based in part on this analysis, the present disclosure provides modified bacteria for use in bioleaching REEs. The modified bacteria comprise at least one engineered genetic change that is correlated with improved bioleaching of the REEs, relative to REE bioleaching by unmodified bacteria of the same species as the modified bacteria. The at least one genetic change results in decreased expression, or increased expression, of at least one gene. In non-limiting embodiments, at least one gene for which expression is modified encodes a protein that participates in phosphate-specific transport system signaling, or encodes a protein that participates in pyrroloquinoline quinone (PQQ) synthesis. In non-limiting examples, expression of a gene that encodes a protein that participates in the phosphate-specific transport system signaling is suppressed. In certain embodiments, the suppressed gene is pstS, pstB or pstC. In certain embodiments, a gene that encodes a protein that participates in the PQQ synthesis is increased. In non-limiting embodiments, the expression of at least one of the genes pqqA, pqqB, pqqC, pqqD, pqqE, tldD and tldE, is increased. In addition to these and other genetic modifications described herein, the modified bacteria exhibit increase expression of mgdh relative to expression of mgdh by unmodified bacteria. In certain embodiments, expression of pstS, pstB, pstC, or a combination thereof is reduced, or expression of pqqA, pqqB, pqqC, pqqD, pqqE, tldD, tldE, or a combination thereof is increased. In these contexts expression of mgdh may also be increased.

[0009] In another aspect, the disclosure provides for contacting a composition comprising the REEs with a composition produced by the described modified bacteria. The composition produced by the bacteria may be considered a lixiviant, or a biolixiviant because it is produced by the described bacteria. The disclosure provides separating REEs from the composition after contacting the composition with the biolixiviant. The separated REEs are suitable for use in a wide range of applications that will be apparent to those skilled in the art.

[0010] In another aspect, the disclosure provides kits that contain one or more sealable containers in which the described modified bacteria are held. The kits may further comprise printed material, such as instructions for use of the modified bacteria to form a biolixiviant, and/or to extract REEs from a composition where they are present.

### BRIEF DESCRIPTION OF THE FIGURES

[0011] FIG. 1. Knockout Sudoku was used to curate a saturating coverage transposon insertion mutant collection for Gluconobacter oxydans B58. (A) The G. oxydans B58 genome contains 3,283 genes. 2,570 genes were fully annotated with a BLAST hit, Interpro ID, and gene ontology (GO) group. An additional 163 genes have an annotation and GO group, but lack an Interpro ID, 399 only retrieved a BLAST hit, but no GO group, and 150 were unable to be assigned any annotation. (B) A Monte Carlo (MC) estimate of the number of genes represented by at least one mutant as a function of the number of mutants collected demonstrated that picking 25,000 mutants would yield at least one disruption for 95% of genes, while picking 50,000 mutants would yield at least one disruption for 99% of genes. In total, we picked 49,256 single-gene disruption mutants and located at least one disruption for 2,733 genes. A Monte Carlo simulation of picking with random drawing from the sequenced progenitor collection (PC) without replacements demonstrates that the genome coverage was truly saturated. The center of each curve is the mean value of the unique gene disruption count from 1,000 simulations while the upper and lower part of each curve represent two standard deviations around this mean. (C) A Fisher's Exact Test for gene ontology enrichment among the non-disrupted (putatively essential) genes revealed significant enrichment (p<0.05, yellow line) of genes involved in translation and other ribosome-related functions. (D) The curated condensed collection (CC) contains 17,706 isolated colonies across 185 plates. High-throughput sequencing of the CC confirmed the location for 4,419 unique disruption strains, representing disruptions in 2,556 genes. 177 genes located in the PC were not located in the CC. No disruption mutant was detected in 550 genes.

[0012] FIG. 2. throughput pH screens of the G. oxydans whole genome knockout collection were used to identify genes that control REE bioleaching. (A) Thymol blue (TB) was used to measure the endpoint acidity of biolixiviant produced by each well of the condensed collection. The ratio of TB absorbance (A) at 435 and 545 nm is linearly related to pH between 2 and 3.4. CC plate 65 contains biolixiviant produced by δpstB strain in wells F7 and G7 (arrowhead), whose absorbance at 435 nm and 545 nm is shown, along with the average absorbance of all wells on the plate. The dashed line represents a typical absorbance spectrum for WT-produced biolixiviant. The A435/A545 ratio for these two wells compared with the average ratio of the plate is well below the lower bound (LB) for the plate, indicating that δpstB produces a much more acidic biolixiviant than the average strain. (B) Bromophenol blue (BPB) was used to measure rate of change in pH at the onset of glucose conversion to organic acids. Rate was measured over a six minute period within five minutes of adding bacteria to a glucose and BPB solution. Condensed collection (CC) plate 162 contains the δtldE strain in wells F11-C12 (arrowheads), whose changes in absorbance over time are graphed along with the average for that plate. A comparison of the normalized rate over OD for each well versus the plate average shows how V/OD for these wells was below the lower bound for CC plate 162. (C) All 185 plates of the CC were screened for acidification using the TB and BPB assays. Hits from both screens were verified in comparison with proxy WT strains. In total, 176 disruption strains were shown to significantly contribute to acidification by t-test with a Bonferroni-corrected alpha (ζ=0.05/#of comparisons). (D) The 25 largest reductions in biolixiviant pH, and 50 largest increases in biolixiviant pH. (E) All significant changes in acidification rate.

[0013] FIG. 3. Genes involved in phosphate signaling, carbohydrate metabolism and PQQ synthesis were significantly overrepresented in the significant hits from high-throughput screens of acidification by G. oxydans. Fisher's Exact Test was used to test for gene ontology enrichment (p<0.05, yellow dashed line). Numbers at base of bars are how many genes from the significant hits are from that gene ontology (GO), out of the total in the genome (in parentheses). Genes selected for further analysis of endpoint pH and bioleaching (FIG. 4) that contribute to an enriched GO are listed above the bars. (A and B) Enriched GO among genes that decrease and increase end point pH. (C and D) Enriched GO among genes that increase and decrease initial acidification rate. Abbreviations: FBP: fructose-bisphosphate; GDP-Man:DolP: dolichyl-phosphate beta-D-mannosyltransferase; GGT: glutathione hydrolase; G6P: glucose 6-phosphate; HTA: homoserine O-acetyltransferase; DD-transepeptidase: D-Ala-D-Ala carboxypeptidase; HAG: hydroxyacylglutathione; Membr: membraneMoco: Mo-molybdopterin cofactor; MS: monosaccharide; MT: mannosyltransferase; M6P: mannose-6-phosphate; Pᵢ: inorganic phosphate; PLP: pyridoxal phosphate; PQQ: pyrroloquinoline quinone; PSK: phosphorelay sensor kinase; Q: queuosine; RNase H: DNA-RNA hybrid ribonuclease; SAM: S-adenosyl-L-methionine; TPP: thiamine pyrophosphate; TOP1: topoisomerase type 1; HK: histidine kinase; UDP-G: uracil-diphosphate glucose; 6-PGL: 6-phosphogluconolactonase.

[0014] FIG. 4. Increased acidification strains of G. oxydans B58 are able to increase rare earth extraction from retorted phosphor powder (RPP). (A and B) A subset of 20 disruption strains were tested for acidification with direct pH measurement. pH measurements significantly different from pWT (black circle) are labeled with asterisks: *, p<0.05; **, p<0.01; ***, p<0.001 (n=5, df=18). Error bars represent standard deviation. (C and D) Ten disruption strains with the lowest final biolixiviant pH and four with the highest were tested for RPP bioleaching capabilities. Outer gray bars represent total REE extracted. Inner multi-colored bars represent fractional contributions of each REE and are Y, La, Ce, Eu, GD, Tb from bottom to top in each bar. Error bars represent standard error for total REE extracted. Percentages are total REE extraction efficiency (based on previously published REE amounts in the RPP). (C) Using a two-tailed t-test between each mutant and pWT demonstrated eight strains were significantly better or worse at bioleaching total REE (+, p<0.05; n=5, df=18). With a Bonferonni correction, only one was significantly better (**, p<0.01/12), but two of the higher pH biolixiviants that extracted detectable REE were significantly attenuated in bioleaching capability (***, p<0.001/12). (D) Disruption mutants for mgdh and pqqC are only able to extract less than 1% of the REE that wild-type G. oxydans can, but still extract significantly more REE than glucose alone when measured at a lesser dilution (***, p<0.001/2). (E) Total REE extraction linearly correlates with pH. Error bars represent standard deviation for pH and standard error for total REE extracted.

[0015] FIG. 5. Clean insertion and deletion mutations targeting genes of interest confer improvements in REE extraction relative to unmodified (WT) bacteria. Biolixiviants produced using modified strains that have increased expression of mgdh driven by an introduced tufB promoter, or clean deletions of pstS or pstB improved REE extraction by 12% and 34% over wild type, respectively. Biolixiviant produced by a clean deletion of mgdh with almost no REE extraction capabilities is included as a control.

### DETAILED DESCRIPTION

[0016] Unless defined otherwise herein, all technical and scientific terms used in this disclosure have the same meaning as commonly understood by one of ordinary skill in the art to which this disclosure pertains.

[0017] Every numerical range given throughout this specification includes its upper and lower values, as well as every narrower numerical range that falls within it, as if such narrower numerical ranges were all expressly written herein.

[0018] The disclosure includes all polynucleotide and amino acid sequences described herein. Each RNA sequence includes its DNA equivalent, and each DNA sequence includes its RNA equivalent. Complementary and anti-parallel polynucleotide sequences are included. Every DNA and RNA sequence encoding polypeptides disclosed herein is encompassed by this disclosure. Amino acids of all protein sequences and all polynucleotide sequences encoding them are also included, including but not limited to sequences included by way of sequence alignments. Sequences of from 80.00%-99.99% identical to any sequence (amino acids and nucleotide sequences) of this disclosure are included.

[0019] The disclosure includes all polynucleotide and all amino acid sequences that are identified herein by way of a database entry. Such sequences are incorporated herein as they exist in the database on the effective filing date of this application or patent.

[0020] The disclosure includes modified microorganisms having any modified single gene, and modifications of all combinations of genes described herein in the text, figures, figure legends, and tables of this disclosure.

[0021] Any gene and any combination of the genes that are described herein may be excluded from the claims of this disclosure. In embodiments, a modified microorganism of the disclosure may comprise or consist of only one modification of a single gene. In embodiments, a modified microorganism of the disclosure may comprise or consist of any combination of gene modifications described herein. In embodiments, only one or only a combination of genes that influence bioleaching of REEs are modified.

[0022] In non-limiting embodiments, the disclosure provides modified bacteria in which the expression of at least one of the genes pqqA, pqqB, pqqC, pqqD, pqqE, tldD and tldE, is increased. In certain embodiments, expression of pstS, pstB, pstC, or a combination thereof is reduced, or expression of pqqA, pqqB, pqqC, pqqD, pqqE, tldD, tldE, or a combination thereof is increased. In certain embodiments, the modified bacteria exhibit increased expression of mgdh relative to expression of mgdh by unmodified bacteria, wherein the increased expression of mgdh is in the context of at least one other described genetic modification.

[0023] In embodiments, the modified bacteria comprises or consist of mutations that are selected from mutations in all of the genes listed in Table A, and including all numbers and ranges of numbers of genes between 1 gene and the total genes in Table A.

[0024] The disclosure includes modifications that disrupt one or a combination of genes, modifications that increase expression of one or a combination of genes, or a combination of modifications that decrease expression of one or more genes and modifications that increase expression of one or more genes. Thus, the modifications involve altering the expression of one or more genes. Increasing, e.g., overexpressing a gene, can be achieved using various techniques that will be apparent to those skilled in the art when given the benefit of the present disclosure. In embodiments, increasing expression of a gene is achieved by substituting an endogenous promoter with a promoter that increases expression of the gene, relative to expression of the gene that is produced by the endogenous promoter. By “substituting” a promoter it is meant that the endogenous promoter (e.g., the promoter that is ordinarily operatively linked to the gene of interest without genetic engineering) has been changed so that is does not drive expression of the gene in the modified bacteria, and therefore the substituted promoter drives gene expression. By making this change, more mRNA is transcribed, thus facilitating production of more protein encoded by the pertinent gene that is operatively linked to the promoter. Substituting a promoter can include inserting a new promoter, while leaving the endogenous promoter in place, or inserting the new promoter in place of the endogenous promoter. The promoter that is inserted so that it is operably linked to and therefore drives expression of the described gene(s) can be heterologous to the bacteria, meaning it is taken or derived from a different organism, or it may be endogenous to the organism but has been introduced into a new location such that it can drive expression of the described gene(s). Various prokaryotic promoters that are suitable for this purpose are known in the art and include, for example, tufa and tufB. The substituted promoter (e.g., the promoter that is introduced into the bacteria) may be a constitutive or inducible promoter. The substituted promoter may be a core promoter, a proximal promoter, or a distal promoter.

[0025] Representative and non-limiting embodiments of promoters that can be used to increase expression of one or more genes as described herein include:
[0026] P_{tufB} which has the sequence:

(SEQ ID NO: 1)
Ccgaaggcatcgtttacggtgctctcgaagtcatgcgccg
tcgcggcggcacgactgcagatccggtggccatgttccac
tcggctctggataacgtgaagcctgcggttgaagtccgct
cgcgtcgcgtcggtggcgcaacctatcaggttccggttga
agtccgcgccgagcgccgtcaggctctcgcgatccgctgg
ctgatcgatgcctcccgcaagcgtggcgagaacacgatgc
aggagcgtctgtccaacgaactgatggatgcggtcaacaa
ccgtggctccgctgtcaagaagcgcgaagacacgcaccgc
atggctgaagccaacaaggcattcagccactatcgctggt
aatcagaaccggttaaagggcttccggcagtgtgtcgatc
tcaggatcgtgcactgactggtttgaactttcagtcttac
tcccgttccaggtggagcggggttttggagaaagacg;

[0027] P₁₁₂, which has the sequence:

(SEQ ID NO: 2)
Ggaactgactcctgatttcgttctgttttcatgggatcaa
tgaacggtcaggcgaaaatgttgcatcggggtgcaggaaa
tttcccgaaaaaaggaaaagacaggctggagcccgcggaa
atcaggcaaaaatcaggtgatatttttttcggattccgtt
tccggaggttcggtatttttcgtcgcaagctcggcgagct
gggctcgggcacgggaaacacgggccctcatcgttccggg
ggcacatcgcagacgcgggcggcatcttcataggacagtt
cctgtgctcccacgagaatcagggcctcccgcaacagatc
gggcagcttccacagcagttctcccaggtcctgaacggca
tcgcgggcattctggcgtgacggtgcagccgtggaaggct
gcatgtcctgctcgatgtcgagcatgatttcctgctcgcg
gctgcgacggcgcgtctgctcgtagaaggcatttctctgt
attgtgaacagccaggctttgaggaccgttccctgctgga
actg

[0028] P₁₁₄, which has the sequence:

(SEQ ID NO: 3)
Gtggcagatgttgagaaatatccgcagttccttccctggt
gtgtgaaggcaagcatccggacccagacggaacaggagct
tgtggcggatctgacgatcgggttcggcccgttccgcgag
accttcaccagccgcgtgacgctggagcggccttcgcgta
tccgggtgcgctacgagaaagggcctttccgttacctgaa
taatgtctggacgttcacgccggatccgcggggctgtctg
gtcgatttcttcgtggatttcgagttccgttcgcgccttc
tgcagaatgcgatgggtgtcgtgttcaatgagggcgtgcg
cctgatggtctccgccttcatcaagcgggcacgggacatt
tacggcacgcaggcgacgaaagcggtccccccggcaccgg
gcctttcccaaaggacataaaatttcgtattatttccaca
accattcggtgcgtgggccgttacaggtctcaagcaccgt
catggtgacatgaaaaggattacgta

[0029] As an alternative or in addition to promoter modification, the disclosure includes addition of and/or repositioning of enhancer elements to increase expression of the described gene(s).

[0030] As an alternative or in addition to changing promoters, the disclosure includes increasing copy number of the gene that is to be overexpressed. In embodiments, one or more copies of the gene can be inserted into a bacterial chromosome, or can be introduced into bacteria using a plasmid. A list of genes for which overexpression is encompassed by the disclosure is provided on Table A. The additional copies of the gene may be in tandem, such as in a polycistronic configuration, or may be separated by segments of the bacterial chromosome or plasmid. In embodiments, a composition comprising the described bacteria are modified by transformation using one or more plasmids, which may be configured to be replicated and transferred to other bacteria in a bacterial population, such as by horizontal transfer.

[0031] In another embodiment, the disclosure comprises decreasing expression of genes. Decreasing expression can be achieved using any suitable approach. In embodiments, decreasing expression comprises disrupting the gene such that the protein encoded by the gene is not produced, or a protein produced by the gene does not function in the same way as if it had not been modified. In embodiments, a protein that is encoded by a modified gene of this disclosure is produced but does not function to impede bioleaching of REEs from a composition comprising them. In embodiments, a modification of a gene comprises a knock-out of some or all of the gene. Modifications of the genes can be achieved using any suitable genetic engineering techniques. In non-limiting embodiments, the modification comprises an insertion, a deletion, or a combination thereof. The disclosure includes insertion within, or a deletion of any segment of a gene, including but not limited to a insertion or deletion of a single nucleotide, such that the encoded protein is not produced or its function is eliminated or reduced. In embodiments, an insertion replaces some or all of the described gene(s). In a non-limiting embodiment, the described gene(s) is modified by insertion of a transposable element. In non-limiting embodiments, the genes are modified using compositions and methods described in U.S. Pat. No. 11,053,493, from which the entire description is incorporated herein by reference. In embodiments, a modification of a gene comprises an insertion as described in Anzai, Isao A., et al. “Rapid curation of gene disruption collections using Knockout Sudoku.” Nature Protocols 12.10: 2110-2137 (2017), from which the entire disclosure is incorporated herein by reference. In alternative approaches, site specific nuclease, such as Cas nucleases, can be used to modify any of the described genes. In embodiments, a type I, type II or type III CRISPR system can be used. Thus, in embodiments, a guide-RNA directed nuclease can make any of the described modifications. In embodiments, recombination of a chromosome or plasmid can be used, such as by introducing a recombination template comprising additional copies of a gene, and/or a promoter, to facilitate recombination of the recombination template into a desired location. In an embodiment, homologous recombination is used, and as such, the recombination template includes left and right homology arms to specify the location of recombination. In embodiments, a transposon system can be used to interrupt a gene sequence, such as the Sleeping Beauty transposon system.

[0032] In embodiments, the modified bacteria comprise a modification of at least one gene described in FIG. 1, FIG. 2, or FIG. 3. In embodiments, the modified bacteria comprise a modification of at least one gene as in Table A. Table A includes gene names and additional information regarding the type of analysis that were used in determining the effects of each gene in the assays that are further described below. In Table A, H=high acidity; L=low acidity; F=fast acidification; S=slow acidification. Table A includes the amino acid sequences of the proteins encoded by the listed genes. The disclosure includes all amino acid sequences that are 80-99% identical to the described amino acid sequences, and all polynucleotide sequences encoding said amino acid sequences. Polynucleotides that encode the described amino acids constitute the coding regions of the described genes.

[0033] In embodiments, the disclosure comprises increasing expression of at least one gene described in Table A. In embodiments, the disclosure comprises decreasing expression of at least one gene described in Table A. In embodiments, the disclosure comprises increasing expression of at least one gene and decreasing expression of at least one gene described in Table A. In non-limiting embodiments, modified bacteria of this disclosure are modified such that they exhibit decreased expression of at least one of the following genes: GO_1415, pstA, pstB, pstC, pstS, ggtl, surA, petP, ykoH, speC, and tonB. In non-limiting embodiments, modified bacteria of this disclosure are modified such that they exhibit increased expression of at least mgdh, and/or genes involved in PQQ synthesis (e.g., pqqA, pqqB, pqqC, pqqD, pqqE, and tldD, also referred to as pqqABCDE as an operon, and tldE), or a combination thereof. In embodiments, any one or any combination of proteins expressed by the pqqA, pqqB, pqqC, pqqD, pqqE, and tldD genes can be modified to increase their activity, such as by modifying amino acids in an active site, or amino acids that improve structural stability, and the like.

[0034] Combinations of modifications that increase and decrease expression of genes are included in the disclosure. The disclosure also includes mixed populations of bacteria, wherein some of the members of the population have different genetic modifications than other members of the population.

TABLE A

| | | | | BPB | | | |
|---|---|---|---|---|---|---|---|
| | | | TB | Acidifi- | | | |
| | | | Final | cation | | | |
| | | | pH | Rate | | | |
| | | | Screen | Screen | Up or | | SEQ |
| Locus | Gene | Features | Pheno- | Pheno- | Down | Amino Acid | ID |
| Tag | Name | Disrupted | type | type | Regulate | Sequence | NO: |
| GO_ | ettA | Energy- | H | F | Both | MAAYQYVYVMKDLTKSYPGGREVFK | 4 |
| 3277 | | dependent | | | | GITLSFLPGVKIGVLGVNGAGKSTL | |
| | | translational | | | | LKIMAGIEKEYGGEAWAAEGARIGY | |
| | | throttle | | | | LEQEPKLDESLTVGENVAQGFGELK | |
| | | proteinEttA | | | | KAVDRFNEISMKFAEPMSDDEMTAL | |
| | | | | | | LAEQADLQEKIDAGDGWELDRKLEI | |
| | | | | | | ALDALRCPSADSPVTNLSGGEKRRV | |
| | | | | | | ALCRLLLEKPDILLLDEPTNHLDAE | |
| | | | | | | SVSWLEKTLRDYAGTVMVITHDRYF | |
| | | | | | | LDNVTNWILEIERGRGYPFEGNYSS | |
| | | | | | | WLTQKRKRLAQEEKEESSRQRALAA | |
| | | | | | | EQEWISSSPKARQAKSKARITKYEE | |
| | | | | | | MLAANAEKAGGTADIVITPGPRLGG | |
| | | | | | | TVIEAENLTKGFGDRLLIDNLSFKL | |
| | | | | | | PPGGIVGVIGPNGAGKSTLFKMITG | |
| | | | | | | DDQPDSGSLKIGETVKLGYVDQSRN | |
| | | | | | | TLDDSKTVWEEISGGTDVIQLGKRT | |
| | | | | | | VPSRAYVGAFNFKGSDQQKRVGVLS | |
| | | | | | | GGERNRVHLAKMLKQDSNVILLDEP | |
| | | | | | | TNDLDVDTLRALEDALAEFAGCAVI | |
| | | | | | | ITHDRWFLDRLATHILAFEGDSHVE | |
| | | | | | | WFEGNFQDYEADKRRRLGPDATEPG | |
| | | | | | | RIKYRPLAR | |
| GO_ | glpX | Fructose-1,6- | H | F | Both | MIDPQNVLPYRVTDRNLALELVRVT | 5 |
| 1534 | | bisphosphatase, | | | | EAAAIASAHWTGRGQKNEADGAAVQ | |
| | | GlpX type | | | | AMRAAFDTVAIDGVVTIGEGEMDEA | |
| | | (EC 3.1.3.11) | | | | PMLYIGEKVGSGGPAMDIAVDPLEG | |
| | | | | | | TNLCAKSLPNALTVVALAERGKFLH | |
| | | | | | | APDIYMEKIVVGPDLPEGVVDLDAS | |
| | | | | | | IGNNLRSLAKAKKRDVSDMVLCALD | |
| | | | | | | RERHEELIAHAREAGARVMLLSDGD | |
| | | | | | | VAAAIATCVDGGGVDLYAGSGGAPE | |
| | | | | | | GVLAAAAIRCMEGQMQGRLLFEDDT | |
| | | | | | | QRERAREMANGLDPARKLFLHDMAS | |
| | | | | | | GHVLFSATGVTSGPLLKGVERPSPS | |
| | | | | | | RARTHSIVMRSKSGTVRYIESHHTF | |
| | | | | | | KPKVKAAS | |
| GO_ | GO_ | hypothetical | H | F | Both | MDLCWTTSCRSTTSRGRAATSACRD | 6 |
| 289 | 0289 | protein | | | | YTASHHDHSPPTIGATLRNGALATP | |
| | | | | | | RLCLGAGPLVLDSARLHLAKRLVAA | |
| | | | | | | LVNSFV | |
| GO_ | GO_ | D-alany1- | H | F | Both | MQVALEPETLPATIFRSEAVRQMRF | 7 |
| 1067 | 1067 | D-alanine | | | | PFQKAFLLCAMTAMGLGSAKAQYAG | |
| | | carboxypeptidase | | | | HISSYVMDARTGAVLSATDAELQRY | |
| | | (EC 3.4.16.4) | | | | PASLTKLMTLYLTFRALEAHQITLD | |
| | | | | | | EQVPVSIHASIQAPSKLGLVPGTRL | |
| | | | | | | TVEQGILGLVTKSANDAACALGEFL | |
| | | | | | | GGGDEVRFAQLMTQQARALGMTNTT | |
| | | | | | | FRNASGLPDPDQVTTAHDLALLSQH | |
| | | | | | | LISDFPQYYHYFNVPSFYFHRRMVP | |
| | | | | | | NHDPMLKIYAGADGLKTGYTDLAGH | |
| | | | | | | NLITSAQRGNVRLIGVVMGAPNNTR | |
| | | | | | | RSMEMVSLLDKGFADEGVAPQPLLH | |
| | | | | | | PVAPSGVLMASARRRGHFRHSVLLA | |
| | | | | | | SSRPMEVADAPTSPRRYGRISHHGA | |
| | | | | | | AVRMVSARHVVAHKKRSRHS | |
| GO_ | GO_ | ABC-type | H | F | Both | MICRFSPKVTLSLLSACLLT | 8 |
| 1076 | 1076 | transport | | | | GPVAMTALSSVALAQTAGAV | |
| | | system involved in | | | | SPADAASAVTPISALYDALK | |
| | | resistance | | | | AAQKTGKTAQQRATMIAPAV | |
| | | to organic | | | | DRAFDLEAILRRSVGVRYNS | |
| | | solvents, | | | | LSPSDRTRLLGSFRQFTIAR | |
| | | auxiliary | | | | YASSFKPEAPAAFTVSPQTR | |
| | | component | | | | PNPTGGLIVDTTIGGTDGGD | |
| | | | | | | VTPIDYIMTNGTSGWRITDV | |
| | | | | | | LLNAHISQVAAQRADFGGAL | |
| | | | | | | SSGGASGLADHLDSKTAHFL | |
| | | | | | | HD“ | |
| GO_ | GO_ | Sphingosine | H | F | Both | MRIALIHNARSRKNRRNGSS | 01 |
| 1658 | 1658 | kinase | | | | FAVEAQALLGKDFVPSDTRE | |
| | | and enzymes | | | | GTTEHVRQLYERGIDTILID | |
| | | related to | | | | GGDGTVSTALTAIARAYPAD | |
| | | eukaryotic | | | | RLPDIVVLASGNTNLIAGDV | |
| | | diacylglycerol | | | | GFGLRGMEAIQRLRQGDLRS | |
| | | kinase | | | | SVRTPIRLSWPGTDRMPVLG | |
| | | | | | | LFGGCAGYARAVRIAHSPTV | |
| | | | | | | LRFAPHDLAVGITLLSTFVS | |
| | | | | | | LMFRKSREEWLRGDPLRIET | |
| | | | | | | GGHVYDGQSFMFLTTGLSHL | |
| | | | | | | SRGIWPFWDAEPNVEGLRYL | |
| | | | | | | DVSAWPDSLLRATAALLCGR | |
| | | | | | | APRWLRRHPDYVSGRTDDMT | |
| | | | | | | LVTESDFVLDGEVFSAAPGG | |
| | | | | | | VLRLERASRFRFLHA | |
| GO_ | GO_ | Putative | H | F | Both | MAGGLLVGMGILAAGTTLAA | 10 |
| 1865 | 1865 | membrane- | | | | ARHIGDGSLAFSLLRAGSRA | |
| | | spanning | | | | GVVGGLADWFAVTALFRHPL | |
| | | protein | | | | GLPIPHTAILPRQKERLGQA | |
| | | | | | | LGRFISGQFFTEDDVRRALS | |
| | | | | | | KIDLSGLIADMLNDPANRQT | |
| | | | | | | LVTSMRSAIPLMFDRMEDGR | |
| | | | | | | AKTAISRALPVLLNGEEMAP | |
| | | | | | | LVSRGMRAMVDSEMHQEVLS | |
| | | | | | | FLLERIKTTVTSRESDLRHF | |
| | | | | | | VEERVREQGGRFLGWAIGGS | |
| | | | | | | VASRVLMALHAEFERVDPMD | |
| | | | | | | SELRHGFTTWVRGEIDRIEN | |
| | | | | | | DPARRKDMADTITSVLTHTS | |
| | | | | | | LKGWSSELWDRLRRMVEEDS | |
| | | | | | | GREDGWSATVIDAAIVQLAS | |
| | | | | | | ALRSNESLRLKVNQAVESTV | |
| | | | | | | QRILPGLREKLSGFIAAVMA | |
| | | | | | | GWDGNDLAARLESRVGRDLA | |
| | | | | | | YIRINGTVVGFLAGAALDGV | |
| | | | | | | SRLFFGV | |
| GO_ | GO_ | ATP-dependent | H | F | Both | MYAVKESLESHLSAKTTSGP | 11 |
| 1873 | 1873 | RNA | | | | SKPRTTATPRRGRPSASRTA | |
| | | helicase | | | | AAATSPTVADKGETSPVTET | |
| | | Atu1833 | | | | PASKAPRTRRTKTAATATEK | |
| | | | | | | TAEVKTPARRTRKAATPAAE | |
| | | | | | | SATESEAPAPKTTGRRKKAV | |
| | | | | | | TEPEAVTELAEAAVAAPAPR | |
| | | | | | | RRRSTKAPEAVTEEAEAAPK | |
| | | | | | | RRGRPRKTPVVEQPAAEVIT | |
| | | | | | | EETVKAPAAPRRRGRPRKVD | |
| | | | | | | VAVAETPVEAPVEKKARQSR | |
| | | | | | | RKASAPVMEAPEPAAEETPA | |
| | | | | | | VQTESTKGEKPARRRRTKAA | |
| | | | | | | AATSAVVEKTVEAPAVVETI | |
| | | | | | | VVAEDVSDRPRFADLGLGEP | |
| | | | | | | IMRAIEELGYEHPTPIQAQA | |
| | | | | | | IPEVLKGHDVLGVAQTGTGK | |
| | | | | | | TASFTLPMLQKLAGSRARAR | |
| | | | | | | MPRSLILEPTRELALQVAEN | |
| | | | | | | FKLYGKYLRLTHALLIGGES | |
| | | | | | | MAEQRDVLNRGVDVLIATPG | |
| | | | | | | RLLDLFGRGGLLLTQTSTLV | |
| | | | | | | IDEADRMLDMGFIPDIEKIV | |
| | | | | | | ALLPAHRQTLFFSATMAPEI | |
| | | | | | | RRLADAFLRHPVEITVSRQS | |
| | | | | | | SVATTIEEALVIVPEDEKRR | |
| | | | | | | TLKKLLRRENVQSAIVFCNR | |
| | | | | | | KRDVDMIQQYLTKHGIEAGH | |
| | | | | | | LHGDLAQSLRFSTLERFRSG | |
| | | | | | | DLKFLVCSDVAARGIDIGGL | |
| | | | | | | SHVFNYDLPFNAEDYVHRIG | |
| | | | | | | RTGRAGNEGHAFSLATPRDR | |
| | | | | | | RLLEAIETLTGKVIARPVLE | |
| | | | | | | GITTVDWAPEDGERRPAETA | |
| | | | | | | TPAPQDVAEEGEQRLRKRRR | |
| | | | | | | GGRKRNRGDRDENETVQEVA | |
| | | | | | | PTAVASVAVIEAPVSHRSVE | |
| | | | | | | LAPAFENDGPKTGFGGDTPA | |
| | | | | | | FMLVPRRRKVTVSGSTDPAA | |
| | | | | | | PVQHDGRHYGNE | |
| GO_ | yqg | Putative | H | F | Both | MPLFNPHDLRNLLQSGQRVL | 12 |
| 2019 | | pre-16S | | | | GLDPGSKTIGVALTDVSLML | |
| | | rRNA | | | | ASPLIGLKRRKLGENAQELA | |
| | | nuclease Yqg | | | | KIVRAQDVGALVVGLPLSLD | |
| | | | | | | GSFGPAARAASDWTQALSEK | |
| | | | | | | LGIPAGLWDERLSSSAVNRF | |
| | | | | | | LIKDADMTRGRRAEVVDKMA | |
| | | | | | | AAYMLQGWLDASRPESPEIF | |
| GO_ | GO_ | Phosphogluconate | H | F | Both | MSLNSVVESVTARIIERSKI | 13 |
| 210 | 210 | dehydratase (EC | | | | SRRRYLALMERNRAKGVLRP | |
| | | 4.2.1.12) | | | | KLACGNLAHAIAASSPDKPD | |
| | | | | | | LMRPTGTNIGVITTYNDMLS | |
| | | | | | | AHQPYGRYPEQIKLFAREVG | |
| | | | | | | ATAQVAGGAPAMCDGVTQGQ | |
| | | | | | | EGMELSLFSRDVIAMSTAVG | |
| | | | | | | LSHGMFEGVALLGICDKIVP | |
| | | | | | | GLLMGALRFGHLPAMLIPAG | |
| | | | | | | PMPSGLPNKEKQRIRQLYVQ | |
| | | | | | | GKVGQDELMEAENASYHSPG | |
| | | | | | | TCTFYGTANTNQMMVEIMGL | |
| | | | | | | MMPDSAFINPNTKLRQAMTR | |
| | | | | | | SGIHRLAEIGLNGEDVRPLA | |
| | | | | | | HCVDEKAIVNAAVGLLATGG | |
| | | | | | | STNHSIHLPAIARAAGILID | |
| | | | | | | WEDISRLSSAVPLITRVYPS | |
| | | | | | | GSEDVNAFNRVGGMPTVIAE | |
| | | | | | | LTRAGMLHKDILTVSRGGFA | |
| | | | | | | DYARRASLEGDELVYSHAKP | |
| | | | | | | STDTDILRDVAAPFRPDGGM | |
| | | | | | | RLMTGNLGRAIYKSSAIAAE | |
| | | | | | | HLTVEAPARVFQDQHDVITA | |
| | | | | | | YQNGELERDVVVVVRFQGPE | |
| | | | | | | ANGMPELHKLTPTLGVLQDR | |
| | | | | | | GFKVALLTDGRMSGASGKVP | |
| | | | | | | AAIHVGPEAQVGGPIARVRD | |
| | | | | | | GDMIRVCAVTGQIEVLVDAA | |
| | | | | | | EWESRRPVPPPLPALGTGRE | |
| | | | | | | LFALMRSVHDPAEAGGSAML | |
| | | | | | | AQMDRVIEAVGDDIH | |
| GO_ | GO_ | Phytoene | H | F | Both | MVFSRMRASSGLPCAQADLD | 14 |
| 2105 | 2105 | synthase | | | | HVERIVTASGTSFARGMSIL | |
| | | (EC 2.5.1.32) | | | | PPDRRQAMFAVYAFCRQVDD | |
| | | | | | | IADGDAGVADPMAALQEWHR | |
| | | | | | | RIDQLYEGVATDALDRILIV | |
| | | | | | | AIHRYQLQAKDFHDVIDGMA | |
| | | | | | | MDCGAPIVAPDEATLDLYCD | |
| | | | | | | RVASAVGRLSVCVFGDSSDN | |
| | | | | | | ARRVAYHLGRALQLTNILRD | |
| | | | | | | IAEDAGRGRLYLPAELLTRF | |
| | | | | | | DVPKDPQEALYAHGLDQVAR | |
| | | | | | | ILAERAKDHFREARNAMRLC | |
| | | | | | | DSTAMRPARMMAASYAPILS | |
| | | | | | | ALEKRGWKTPDIAPKVCKPW | |
| | | | | | | RQLRTLAAYVK | |
| GO_ | GO_ | Adenosyl | H | F | Both | MGSKGHFMTTQDYKVRDITL | 15 |
| 2223 | 2223 | homocysteinase | | | | ADWGRKEISIAEGEMPGLMA | |
| | | (EC 3.3.1.1) | | | | LREEYKDSQPLKGARIAGCL | |
| | | | | | | HMTIQTAVLIETLIALGATV | |
| | | | | | | RWSSCNIFSTQDHAAAAIAA | |
| | | | | | | AGIPVFAWKGLTEEEFNWCI | |
| | | | | | | EQTIHGPDGWTPNMILDDGG | |
| | | | | | | DLTIMMHDKYPEMLKDVRGI | |
| | | | | | | SEETTTGVHRLWEMSKKGTL | |
| | | | | | | KVPAINVNDSVTKSKFDNLY | |
| | | | | | | GCRESLVDAIRRGTDVMMAG | |
| | | | | | | KVAVVAGYGDVGKGSAASLR | |
| | | | | | | NAGCRVLVTEVDPICALQAA | |
| | | | | | | MEGYEVVTMENAAPRGDIFV | |
| | | | | | | TCTGNVDIITIDHMREMKDR | |
| | | | | | | AIVCNIGHFDSEIQVEALRN | |
| | | | | | | YRWNNIKPQVDEIELAPNRR | |
| | | | | | | IILLSEGRLVNLGNATGHPS | |
| | | | | | | FVMSASFTNQTLAQIELWTA | |
| | | | | | | KPGQYEVKVYTLPKALDEKV | |
| | | | | | | AALHLAKVGAELSKMSQKQA | |
| | | | | | | DYIDVPVNGPFKHEEYRY | |
| GO_ | GO_ | Riboflavin | H | F | Both | MFSGIIERLGTVRSACVRDR | 16 |
| 2309 | 2309 | synthase | | | | AMDLTVETGFPDLELGESVA | |
| | | eubacterial/ | | | | VNGVCLTVETFDAAGVATFH | |
| | | eukaryotic | | | | LSGETLSRTPLDQLKTGSRV | |
| | | (EC 2.5.1.9)\ | | | | NLERAVAASTRLSGHIVQGH | |
| | | Diamino | | | | VDGVATLASVEKAGDSYALR | |
| | | hydroxyphosphoribosyl | | | | VFVPQALRQYVVEKGSITFD | |
| | | aminopyrimidine | | | | GISLTVNELHDDITRGNQAG | |
| | | deaminase (EC | | | | FEVGLTIIPHTWEHTNLSTL | |
| | | 3.5.4.26) | | | | SVGDRMDVEVDVLSKYVENL | |
| | | | | | | LRFSPSLGKVAS | |
| GO_ | GO_ | hypothetical | H | F | Both | MRRCVAAIRKAALFGLVFAG | 17 |
| 2456 | 2456 | protein | | | | IAGAGSASAAEAAWTASKCG | |
| | | | | | | AEPQAPAVKAATVAQYNESV | |
| | | | | | | DRVTAYEKAARVYNACVSAQ | |
| | | | | | | ANREETAISQEASARISHVH | |
| | | | | | | AGSAAVQSHIAASFQTLSSN | |
| | | | | | | LAAASRKLGHH | |
| GO_ | GO_ | TonB-dependent | H | F | Both | MRSRYCLCATTALALSVSAA | 18 |
| 2571 | 2571 | receptor | | | | FAQSDVAPKSRSHRPTQTHK | |
| | | | | | | SAATKEDSPSMMGSTSPTDE | |
| | | | | | | ARSETVRVQGSRRSSPGAGL | |
| | | | | | | MVHEDAAKSRSTVTQEFISK | |
| | | | | | | QTPGVNPMQLIAMLPGVNTT | |
| | | | | | | SVDPLGLNGGNMTMRGLNAS | |
| | | | | | | QIGFTLEGFPINDIGNYAVY | |
| | | | | | | PQEIVDSENLRSITVEQGSA | |
| | | | | | | DLDSPHISASGGAVNMYLLD | |
| | | | | | | PKDHFGGHLDGTYGSYNSRR | |
| | | | | | | IFGRMDTGKIGNTNLKGYVS | |
| | | | | | | FSAAHEDSWRGPGSQRKLHG | |
| | | | | | | ETKWVNEWGQGNRISLAIVG | |
| | | | | | | NQSNSTLFPSMSLANWNKYG | |
| | | | | | | VNYTYTGKWNPSSPSTNYYK | |
| | | | | | | LHQNPFTNIYASAPSTFTLT | |
| | | | | | | DHLTLTETPYFWYGNGNGGG | |
| | | | | | | AYNESLSSQQYGAQTLSASI | |
| | | | | | | GQYNSSNTKSLLVYNPSNTQ | |
| | | | | | | TYRPGAVTKLALHTGANRLM | |
| | | | | | | IGYWFEYSKQIQTSPYSLVN | |
| | | | | | | MATGTPLDVYGGGTNMVLSN | |
| | | | | | | GVTAEYRDTLTQTRIHTLFI | |
| | | | | | | DDSLSLLNNHLTLEAGLKYA | |
| | | | | | | MVARQGHNFLPDTSTGPYIN | |
| | | | | | | GSWNEPLPAASIRYKLNNEI | |
| | | | | | | QLFASGTTNFRIPMNTALYD | |
| | | | | | | SGTYTSGSGYSTKANTNMKP | |
| | | | | | | EISISEEAGIRYQGALFNGT | |
| | | | | | | LSYFHYNFTNRLYSETVVQS | |
| | | | | | | NGAYYSTSVNGGSSHADGVD | |
| | | | | | | FEIGTRPILYHLRPYISAEY | |
| | | | | | | IDARTDSNVAAGGSTNDYVH | |
| | | | | | | SKGKFAPQTAKVQVAFNLDY | |
| | | | | | | DDGAFFSGFGLKYVGKQYAT | |
| | | | | | | FNNDTSIPGYVTMDVHAGYR | |
| | | | | | | FRNYGVLKNPVLKLNIQNIT | |
| | | | | | | NNHYLGFVNGTASNGKATTG | |
| | | | | | | VFGSAIAAGSTTYYVASPFF | |
| | | | | | | VGGSASVDF | |
| GO_ | GO_ | hypothetical | H | F | Both | MKKCHNPARLRGICRLAQDD | 19 |
| 2699 | 2699 | protein | | | | RSQYIGIMRLLPTLPRLLLV | |
| | | | | | | AALAMTPTILVPWHHAQAQD | |
| | | | | | | ADDAEAEQEAEAAQKKAEAR | |
| | | | | | | KAAQRAAPPSALPGAEASDD | |
| | | | | | | DAGHARSDVNPTTALFDAIN | |
| | | | | | | RGSLNAAKEALNRGADMGGH | |
| | | | | | | NVLDQTPLDMAIDLNRKDIM | |
| | | | | | | FLLLSMRTYNPDGKIENSVS | |
| | | | | | | DEGVEMKNGSGHLTIGGKSV | |
| | | | | | | TPKRSLVAASPHFDTSGGKP | |
| | | | | | | DPSVGFLGFAGH | |
| GO_ | GO_ | ROK family | H | F | Both | MADYRLGIDLGGTKIEIAVL | 20 |
| 2761 | 2761 | sugar | | | | NRSGDLVLRERIPNPGIYNE | |
| | | kinase or | | | | AVLAIRDLVTDVDRRLGAVP | |
| | | transcriptional | | | | SHRVSAGQHTSTLGIGIPGS | |
| | | regulator | | | | ISPETGLIKNANATWLNNQP | |
| | | | | | | FGQDLESALARPVRTENDAN | |
| | | | | | | CAADGAAKGMLTVFGVIIGT | |
| | | | | | | GMGAAIVNNGRVLEGRHHIA | |
| | | | | | | GEWGHLPLPWPTEEDMPARD | |
| | | | | | | CFCGNKGCMERYLCGPALAA | |
| | | | | | | DWKGPGHRNTAGIEDAAANG | |
| | | | | | | DQAAIAALGRYTERFARACA | |
| | | | | | | MVINFLDPDVIVLGGGVSNL | |
| | | | | | | HTLYERVPPLLAKHVITPVC | |
| | | | | | | TTPIVRNKHGDSSGVRGAAW | |
| | | | | | | LWDVTE | |
| GO_ | GO_ | hypothetical | H | F | Both | MQKIFSLSEIGASDVSHDLV | 21 |
| 2829 | 2829 | protein | | | | SFDIFDTLVYRRYLEVNEVH | |
| | | | | | | DLASAYALSLLGQFGKENPG | |
| | | | | | | ALTLTRYDITNVMKAAAHER | |
| | | | | | | IEEPTLEAVWSRLFTARIGH | |
| | | | | | | TEKALTLGRKVAAFEYEIDR | |
| | | | | | | QNLYAVEGAAEMLAALKAQG | |
| | | | | | | KTVIAISDMYFSQTEIEGIL | |
| | | | | | | LQTGLARHIDRVFVSSQENL | |
| | | | | | | TKHSGNLFTHVWKQFDIAPA | |
| | | | | | | KTLHLGDNTHSDVAMPTSLG | |
| | | | | | | GNAIHVAHAPLLRIKRPDYG | |
| | | | | | | RRPDIHMEIGDLSKLFLTQL | |
| | | | | | | LLCAQSDGSDRLFFLSRDGC | |
| | | | | | | LLHKVLEKWNSPLFRNFFTP | |
| | | | | | | IHSEDLFLSRAVTCWLNVNF | |
| | | | | | | QDKWLLQSIGHAFWLHHGKA | |
| | | | | | | TPRQISGMLGIDATPAGLDA | |
| | | | | | | DKVYHSSMDTFTVLEAYEAS | |
| | | | | | | GL VEEIRTALLHKRAMAAS | |
| | | | | | | YLKDAGVLNHQSVHVCDVGY | |
| | | | | | | SGTVVRDLNTFFLQEGPQGL | |
| | | | | | | GGSIPQVYFHCIASNANYSG | |
| | | | | | | NARTALPHVIFQKDVILNDG | |
| | | | | | | LLPGELKDSFAWLEMFFKHP | |
| | | | | | | LYGPLLGYRKDGDRTVPSYD | |
| | | | | | | VAAQEDPHHPCHLILNTIKS | |
| | | | | | | DPSDIVLLWMSAVGFWSQFT | |
| | | | | | | SPLIERFLNPDESTIEQMLS | |
| | | | | | | DVYEVDAVSGKTRSVVLVAP | |
| | | | | | | ELSDDEIRHRAQREDYWIPG | |
| | | | | | | SLVASRLARTRSAFETDAEQ | |
| | | | | | | KSLVNKLRALANGGTAGKGS | |
| | | | | | | KQAEKNQDAFDPAFYRRFYR | |
| | | | | | | DLSALPNDRALEDHYFTHGK | |
| | | | | | | LVGRYGSEAMMKREQAALEQ | |
| | | | | | | RLPRDFDAGAYFMANPDLPV | |
| | | | | | | TQPVSWTATRHYLNIGAVQN | |
| | | | | | | RPYHYHFPGLDEAFEALLAT | |
| | | | | | | NEISLSDAERKDYQDGVPAR | |
| | | | | | | ILLLRRLGAISAPWFNMLDL | |
| | | | | | | QEFSALNFEWCGKPASAAEA | |
| | | | | | | ILTFLKDGIERIAPLSVSVA | |
| | | | | | | FDPDFYRRQYTDTADLSDVD | |
| | | | | | | AYRHWLEAGSLMHRAPSEEW | |
| | | | | | | ALQHMIGQRTYPPAFHWDRF | |
| | | | | | | QATDRARFARSTRLDLLDAF | |
| | | | | | | LSTAVPPRDDLVGGPGAGD | |
| | | | | | | LWTWRAARAQGAGDQHLSTE | |
| | | | | | | CLREAARVEPHRGVFWHTLG | |
| | | | | | | DRLQSQGDLHGALEAYTRCL | |
| | | | | | | KTDTPNRWSHINCIRLSADL | |
| | | | | | | GFYKKGLEHLRAAQAAWKEM | |
| | | | | | | QPWREARTHLFMRWFDHAAH | |
| | | | | | | HSYDRITQDDIRARTHPDAR | |
| | | | | | | FLAFMNTFVPAVASIGIPAP | |
| | | | | | | LTLARTDGPILILSGSGLSE | |
| | | | | | | RTRWEASLRIAPEDARQVIV | |
| | | | | | | FSREQVALFAESLPGASVAL | |
| | | | | | | YHEVETDGLIVDTLLRAKAL | |
| | | | | | | GVRNIYWAGPLGRDSTGEGP | |
| | | | | | | DLSDLAWSDFLLSRDSRETG | |
| | | | | | | RTLRSIHAATMCDDVVLTMP | |
| | | | | | | SLITRFHDLGLRPRLGVSAL | |
| | | | | | | MEALADMPRTTETAPGKIRI | |
| | | | | | | FCSLTGRPVRVSTSDEDAYA | |
| | | | | | | PRIGQKALLKALDTLLETYP | |
| | | | | | | DVSLLVEGVDPALPLSIRNS | |
| | | | | | | TRIERLGSELTSDQRLAALS | |
| | | | | | | RSSIALDLRHVPRDQRSLAD | |
| | | | | | | EATWSGIPCLVLSDNPALGS | |
| | | | | | | ASTPGYAKWAQISEILKAWI | |
| | | | | | | GQPQTLEDVTLAARTHFEEA | |
| | | | | | | VSPTPVVWSPVRAVPTTKAR | |
| | | | | | | PRILFANLFAPPQTTGGATR | |
| | | | | | | VLSDNAGYMLAHAGDDYDFA | |
| | | | | | | ILASDDENSHRGVTRVDSWK | |
| | | | | | | GAPVFRIATPQEIDMDWRTY | |
| | | | | | | NSEVDAQTRRIITLFKPDLV | |
| GO_ | GO_ | Acetylornithine | H | F | Both | MIPALMPNYKRADLAFEQGE | 22 |
| 2902 | 2902 | aminotransferase | | | | GVWLTATNGRRYLDFGAGIA | |
| | | (EC | | | | VTSLGHAHPKLVKTIAEQAA | |
| | | 2.6.1.11) | | | | KVMHVSNLYRIPQAEKLAEL | |
| | | | | | | LVQNTFADSVLFCNSGAEAN | |
| | | | | | | EGMVKMIRRAQFENGHPERT | |
| | | | | | | NILCFNGAFHGRTLAMISAT | |
| | | | | | | GNPAYLKGFGPVVEGFDHAP | |
| | | | | | | FNNTNTLRDAITPHTAGIVV | |
| | | | | | | EPVQGESGIKPATREFMEGL | |
| | | | | | | RAVCDEYGLYLGFDEVQTGV | |
| | | | | | | GRTGKLFAHEWYGVRPDVIS | |
| | | | | | | VAKGIGGGFPLGAVLATEEL | |
| | | | | | | ARHLTPGSHGTTFGGNPLAC | |
| | | | | | | AAGVTVLEEILSPGFLEHVR | |
| | | | | | | SVGDAFGRMLEDVVSRSEGV | |
| | | | | | | FDNVRGIGLMRGLHCVPPVA | |
| | | | | | | DVMQAVLNQELLTVSAGDNV | |
| | | | | | | LRLVPPLIVTETECREACER | |
| | | | | | | LVKAADSLKVPATQENAS | |
| GO_ | GO_ | Transcriptional | H | F | Both | MSQETNAPELHQLTAQIVTA | 23 |
| 3260 | 3260 | regulator | | | | YVSNNDIPADALPALIRSVH | |
| | | | | | | DSLATVNVPEEAPVEKPVPA | |
| | | | | | | VSPRKSVFPDYIICLEDGKK | |
| | | | | | | LKLLRRHLKTAYNMTPQEYR | |
| | | | | | | ERWGLPPEYPMVAPNYANHR | |
| | | | | | | SSLARKIGLGRRRED | |
| GO_ | GO_ | UDP-glucose 4- | H | F | Both | MRYLVTGGAGFVGSHVVLAL | 24 |
| 36 | 36 | epimerase (EC | | | | RDAGHDVVVLDNLSTGYREA | |
| | | 5.1.3.2) | | | | VPAGVPFHKVDLLDYAATSA | |
| | | | | | | VVAQGNWDGVLHFAALSLVG | |
| | | | | | | DSMRDPFHYLRQNYLTALNL | |
| | | | | | | VQICAGHGVRKIVFSSTAAL | |
| | | | | | | FGGPERLDPIPETAPVQPGS | |
| | | | | | | PYGESKFMIERVLHWADAIY | |
| | | | | | | GLRSACLRYFNAAGADPQGR | |
| | | | | | | AGEDHRPETHLIPLTIDAAL | |
| | | | | | | GRRPALKLFGTDYPTRDGSC | |
| | | | | | | VRDYIHVTDLADAHIRALAQ | |
| | | | | | | IDQRSVTYNIGNGHGYSNLE | |
| | | | | | | IIQSVERVSGRKVPWEPAPR | |
| | | | | | | REGDPALLVADSTTLRNDTE | |
| | | | | | | WAPRFGDIDSIVETALRWRE | |
| | | | | | | SHPHGYGG | |
| GO_ | GO_ | hypothetical | H | F | Both | MSPENDQDRNRPDPGDYARA | 25 |
| 406 | 406 | protein | | | | PKQPAGPASGARPQARFDRE | |
| | | | | | | RLSNDYDDEPPPRRRPAAAG | |
| | | | | | | GASGAGRLTSVLGNDPATRK | |
| | | | | | | LVGGAVGIGVVLLLAVGGWS | |
| | | | | | | LMGSHHGGIPIIGPPPGPVK | |
| | | | | | | DRPADPGGMQIMGGDDGDTD | |
| | | | | | | MTGNGEAHLAPGPEQPDTKA | |
| | | | | | | LARQYGVPPGTPAPETPKAD | |
| | | | | | | APKADGAAPDNAPAAQTPAI | |
| | | | | | | PPEAAAPADTGQMSPGTALP | |
| | | | | | | ATVPEKPQDQAAAPAEAPKA | |
| | | | | | | APPKEAPKKEEAPVHHAARP | |
| | | | | | | AEKPLPAPVPEPENVGPPKA | |
| | | | | | | AAPAAETSGGTHEVQLGALD | |
| | | | | | | SEAAARKEWDSLRHQAPALF | |
| | | | | | | AGHTPLFEKTIRGDHTFVRL | |
| | | | | | | RIGGFADLKSARAYCVKLHA | |
| | | | | | | QSVACTPAQF | |
| GO_ | GO_ | Transcriptional | H | F | Both | MKKAVTLNSVAVEAGVSRAT | 26 |
| 868 | 868 | regulator, LacI | | | | ASLVLRDSPLVSLETRDRVI | |
| | | family | | | | GAMDKLGYIYNRGAANLRGQ | |
| | | | | | | KTGTIGLVLCDIGSPFYSQL | |
| | | | | | | MLGVDEVIVDANIVAILVNS | |
| | | | | | | AENPDRQLRQIRRLREHGVD | |
| | | | | | | GLILCPAAGSSDALLSEIER | |
| | | | | | | LHLPCVQVLRHVSQRNGNYV | |
| | | | | | | GPDYADGTSLAVTHLVRHGR | |
| | | | | | | RKIAFLGGKPVHSAARERLD | |
| | | | | | | GFRKTLKKYKLEHDLIIPTQ | |
| | | | | | | LENLSDLGSFPELLASSTPP | |
| | | | | | | DAVVCYNDMLAQSVMGYLLA | |
| | | | | | | RGKMPGRDFAVIGADDLPQS | |
| | | | | | | AVSFPTLTTIVTDPVGVGRN | |
| | | | | | | AARLLLDRIDNPATSSTRIL | |
| | | | | | | VSGQLMIRQSCGGQLS | |
| GO_ | hemK | Peptide chain | H | F | Both | MMMAKDDLLREASQALEQAG | 27 |
| 1937 | | release | | | | IEDARREARLLLCWATGRDL | |
| | | factor N(5)- | | | | GGLLSLDGVEPAQKSRFAEA | |
| | | glutaminemethyl | | | | LKRRLEREPLAFITGETGFW | |
| | | transferase (EC | | | | TLDLETGRDTLIPRADSEAL | |
| | | 2.1.1.297) | | | | IEALLDVCPDRNAPLSILDL | |
| | | | | | | GTGTGCLLLAALSEYPQATG | |
| | | | | | | VGVDLSPQAVALAQRNSVRT | |
| | | | | | | GLEKRTAFLAGSWADALNAR | |
| | | | | | | FDVVLSNPPYIETGDLAGLM | |
| | | | | | | PEVLQYEPARALDGGTGGLD | |
| | | | | | | AYRILCAALPALLVPGGYAI | |
| | | | | | | LEMGIGQIDAVSALGVASGL | |
| | | | | | | RDVAHKADLGGIERALVLQS | |
| | | | | | | DG | |
| GO_ | ntrX | Nitrogen | H | F | Both | MEHEILIVDDEPDIRFLIEG | 28 |
| 174 | | regulation | | | | ILNDEGYKTRTAANSDQALE | |
| | | protein NtrX | | | | LFRAHCPSLAILDIWLQGSR | |
| | | | | | | LDGIELLKIFQTEEPGLPTL | |
| | | | | | | MISGHGTIETAVSSLKLGAY | |
| | | | | | | DFIEKPFQSDRLLVVVRRAL | |
| | | | | | | EAARLRRENAELRLRAGPET | |
| | | | | | | TLSGDGAVISAVRAQIERVA | |
| | | | | | | PTNSRVLISGPAGSGKEVAA | |
| | | | | | | RMIHARSRRAEGPFIALNCA | |
| | | | | | | TLAPNRFEEELFGLEGEDGQ | |
| | | | | | | PMRRGVLERAHRGTLLLDEV | |
| | | | | | | ADMPPETQGKIVRALQDQTF | |
| | | | | | | ERLGGNTRVKVDIRVIATTN | |
| | | | | | | RDLQSEIAAHRFREDLYYRL | |
| | | | | | | AVVPLRIPSLRERREDIPGL | |
| | | | | | | ARHFLERCAQSSGLPVRELS | |
| | | | | | | VDALAALQSYEWPGNVRELR | |
| | | | | | | NLMERLLIMMPGTGNDPIRA | |
| | | | | | | DMLPATISQGAPSMTRLNSG | |
| | | | | | | ADVMSLPLREARDLFETQYL | |
| | | | | | | QVQLMRFGGNISRTASFVCM | |
| | | | | | | ERSALHRKLKQLGVTTNEER | |
| | | | | | | NTAPSTPVSG | |
| GO_ | paaD | PaaD-like | H | F | Both | MSEAMTDITPSEDTATAPAP | 29 |
| 1871 | | protein | | | | GTAPDQEAVIAAIATVYDPE | |
| | | (DUF59) | | | | IPVNIYELGLIYAIDLHDDG | |
| | | involved in | | | | RVHIEMTLTAPNCPSAQELP | |
| | | Fe-Scluster | | | | EMVRDAVSHVPGVSQATVEI | |
| | | assembly | | | | VWDPPWDMSRMSDDARLALN | |
| | | | | | | MF | |
| GO_ | tps1 | Trehalose-6- | H | F | Both | MIQVPFPPSRAALLLDFDGT | 30 |
| 2181 | | phosphate | | | | LVDIAPTPESVRVPQGLAAD | |
| | | phosphatase (EC | | | | LLRLRDMLDGALAIITGRPI | |
| | | 3.1.3.12) | | | | AQIDHFLPDIPHAVAGEHGV | |
| | | | | | | MMRHAPGQALRERKLPVVPG | |
| | | | | | | EWIQAVEKAAADHPGASVEH | |
| | | | | | | KKAGMVLHYRRAPEAESVFR | |
| | | | | | | ELASVWPVENRGFHLQDAQM | |
| | | | | | | AIELRPLGIDKGKALRELMA | |
| | | | | | | EPPFAGRLPVFAGDDATDRD | |
| | | | | | | GVRAARQMGGAGWLIPDDFP | |
| | | | | | | DAATFRRWLHDLSEGHGWGA | |
| GO_ | mur | Manganese | H | F | Both | MVADTKIAERRAGPGNRKAP | 31 |
| 3261 | | uptake | | | | SSPVPDDSHIARLCVESGLK | |
| | | regulation | | | | MTGQRRVIAHVLSVADDHPD | |
| | | protein | | | | VEELYRRASEIDSRISVATV | |
| | | MUR | | | | YRTVRLLEEKGILERRDFGG | |
| | | | | | | GRARYEASDSGNHYHLIDVD | |
| | | | | | | SGRVIEFEDEEPVRLLAQLA | |
| | | | | | | QRLGFDLVSHRIELFGRRAE | |
| | | | | | | PDDRKKSPSENRNKSGS | |
| GO_ | GO_ | Shikimate 5- | H | F | Both | MIDGHTKLAGVMGWPVEHSR | 32 |
| 2463 | 2463 | dehydrogenase I | | | | SPLMHNHWCRVNGVNGAYVP | |
| | | alpha (EC 1.1.1.25) | | | | LPTRPEGFDQALRGLAAAGF | |
| | | | | | | QGVNVTIPHKEAAMLACDEL | |
| | | | | | | TPTAKRAGAVNTICFVAGRI | |
| | | | | | | IGDCTDGTGFCDNLSAHDVE | |
| | | | | | | ISGRAMVLGAGGAARAVAAA | |
| | | | | | | LLDRGCEVVIANRTLERAEA | |
| | | | | | | LVEALGGGEAVAWYEWPSLL | |
| | | | | | | SGCSLLVNATSMGMGGKAGL | |
| | | | | | | DWDAVLREAAPGLCVTDIVY | |
| | | | | | | TPRETPLLLAAQARGLRTVD | |
| | | | | | | GLGMLVHQARAGFRAWFGVD | |
| | | | | | | PQADQTTFDLLAASLRTDA | |
| GO_ | cyoA | Cytochrome O | H | S | Up | MMKAGPMKKLWRYLPALPAL | 33 |
| 2506 | | ubiquinol | | | | MLSGCTVDLLQPRGPVAEMN | |
| | | oxidase | | | | RDVMVAEFVIMMLVVVPTCA | |
| | | subunit II | | | | ATLYFAWKYRASNKEAEYLP | |
| | | (EC 1.10.3.—) | | | | TWDHSTAIEYVIWGVPAILI | |
| | | | | | | ALLGAISWWSTHAYDPYRPL | |
| | | | | | | QTADNVKPLNVQVVSLDWKW | |
| | | | | | | LFIYPDLGIATINQLDVPTN | |
| | | | | | | TPLNFQITSDTVMTSFFIPR | |
| | | | | | | LGSMIYSMPGEQTQLHLLAS | |
| | | | | | | ESGDYLGEASQFSGRGFSDM | |
| | | | | | | KFRTLAMDPAQFNDWVEKVK | |
| | | | | | | SGSENLDDTTYPKYAAPQEA | |
| | | | | | | APVQYFAHVQPDLFDGIVAK | |
| | | | | | | YNNGMMVDKKTGKVMHMQSA | |
| | | | | | | SNTAPSDTGMKE | |
| GO_ | cyoD | Cytochrome O | H | S | Up | MTQAPTTTMTGDSHGSYPSY | 34 |
| 2503 | | ubiquinol | | | | LIGFVLAVILTVASFAAVMS | |
| | | oxidase | | | | HALSPGMALAALTVLAVVQI | |
| | | subunit IV | | | | VVHLVFFLHMNTSTEQSWNL | |
| | | (EC 1.10.3.—) | | | | MCFIFAAASVIVIIGGTIFI | |
| | | | | | | MHDTAINMMSR | |
| GO_ | lam | Lysine 2,3- | H | S | Up | MDDMVKTAPRHSTKRHTLRT | 35 |
| 2812 | | aminomutase | | | | PSDLIDAGLAPEADRATLEA | |
| | | (EC | | | | VGERFTMAIPPAFQDLITHP | |
| | | 5.4.3.2) | | | | DDPIARQVIPDARELITLPH | |
| | | | | | | EDADPIGDDALSPVPGIVHR | |
| | | | | | | YADRALLKPLLVCPLYCRFC | |
| | | | | | | FRREHVGPGGGLLSDAQLEA | |
| | | | | | | ALDWVRQHPDIREIILTGGD | |
| | | | | | | PLMLAPRRLKHIVQSLSDIP | |
| | | | | | | HIETIRIHSRVPVADPGRMT | |
| | | | | | | EELLDAMETDRSMWLVVHAN | |
| | | | | | | HANELTPQAIKGIRAVLSRA | |
| | | | | | | IPVLSQSVLLRGVNDTVESL | |
| | | | | | | EALLRAFLKARVKPYYLHHL | |
| | | | | | | DAAAGTGHFHVPVAEGQALL | |
| | | | | | | RQLRGRVTGLAWPTYVLDIP | |
| | | | | | | GGRGKVPIGPEYLDPASPGT | |
| | | | | | | VSTPDGEACSFT | |
| GO_ | GO_ | NADH | H | S | Up | MASRSEILIVGGGVAGLSLA | 36 |
| 923 | 0923 | dehydrogenase | | | | TRLGKSMGKSGKARITLIDK | |
| | | (EC | | | | SFSHVWKPMLHCFASGTLSN | |
| | | 1.6.99.3) | | | | ENDKVNFISQASGHHFEFWP | |
| | | | | | | GEVASIDRENREVVLSPLLE | |
| | | | | | | ADGTVILESRRMKYDTIVIA | |
| | | | | | | IGSCANDFGTPGVKEHCMSI | |
| | | | | | | DNLVEANAFNEKFRMELLRA | |
| | | | | | | FGNNSELDIAIVGGGATGVQ | |
| | | | | | | LAAELHKALEIVGPYNLHAF | |
| | | | | | | GKAPPKLHVTLLQSGARILP | |
| | | | | | | AFPESVSAAAQQELEHIGVT | |
| | | | | | | VRTNARVAAADDHGFTLKDG | |
| | | | | | | SYVPAKLRVWAAGVKAPEVT | |
| | | | | | | TAYGGLTINRTGQILVNPNL | |
| | | | | | | SSIDDEHIFALGDCSFIQDD | |
| | | | | | | PLPATAQVARQQAKHLARYL | |
| | | | | | | PAWIEHGQKVPSCIFHNKGA | |
| | | | | | | IVALGKYNGWAALPGGTVWG | |
| | | | | | | GGISHGFSARMAHLMLYRQH | |
| | | | | | | QIELFGYYRGLMSFYSDWVE | |
| | | | | | | TFVRPSVRLD | |
| GO_ | GO_ | hypothetical | H | S | Up | MSGCSDPEGIFAPDSAAVRA | 37 |
| 1060 | 1060 | protein | | | | FRARLDSQPSATAALQARCS | |
| | | | | | | TPIRVIRLSVDRPVTEDILT | |
| | | | | | | LLQVRETHQVMTRHVRLLCG | |
| | | | | | | ETVLSDAWNWYVPERLSPAM | |
| | | | | | | NTLLEQTDTPFGRVVRQTAF | |
| | | | | | | RRQRLETRFPGRASGIVLEN | |
| | | | | | | RALLLRGADNAPISLVVEDY | |
| | | | | | | LPAAIRP | |
| GO_ | GO_ | FIG00687856: | H | S | Up | MPDVLEQRLIGELTTPVDPG | 38 |
| 1659 | 1659 | Predicted | | | | VVAFADALARACPVLPLGVL | |
| | | nucleotidyl | | | | FYGSLLRKADPDGILDFYII | |
| | | transferases | | | | TENAAGFAGGLVARTGNLVL | |
| | | | | | | PPNVRYSEFRHGGRVLRAKI | |
| | | | | | | AVLSRAQFEARTGLGALDTT | |
| | | | | | | IWARFCQPVRLVWVRDPQSA | |
| | | | | | | DVILSLIAGCVTTATCWAAL | |
| | | | | | | LGDVSMTALEFWQTLFAHTY | |
| | | | | | | ASELRVEKKGRGNSILEGQE | |
| | | | | | | ARYAALLTLGWARGRLQFSA | |
| | | | | | | HGDRLEPVIDAALRRKAARR | |
| | | | | | | WALIQISGRPRNVSRLLKAA | |
| | | | | | | FTFENGASYLAWKIQRHTGF | |
| | | | | | | DMQLSPFESRHPLVMLPRLL | |
| | | | | | | WRARGLLARSKA | |
| GO_ | GO_ | AMP-binding | H | S | Up | MSGNPNGASPGLTEANQNPT | 39 |
| 1662 | 1662 | enzyme, | | | | ANPVPTPSRSGLERRYGDFP | |
| | | associated | | | | SFAAALDYAAQGESGFNIYS | |
| | | with | | | | GRGQLLEALPYRLLREQARS | |
| | | serinepalmitoyl | | | | MACRLLGLGLVPGDRVAIVA | |
| | | transferase | | | | ESDGDFARIFFGCQYAGLVP | |
| | | | | | | APLPLPVAFGGREGYVTTLR | |
| | | | | | | GMIQSAAARAVVVPDVIGSW | |
| | | | | | | TADIVDGLDLVFGGSPADLY | |
| | | | | | | RHAEARVELPEISPTALSYL | |
| | | | | | | QFSSGSTRFPMGVSVTQAAG | |
| | | | | | | MANARAIARDGLHVYPAEDP | |
| | | | | | | RDDRCVSWLPLYHDMGLVGF | |
| | | | | | | FLTPLTCQLSVDLLPTREFA | |
| | | | | | | RRPHVWLDLISRNRGTIAYS | |
| | | | | | | PSFGYELCARRSGQADLDLS | |
| | | | | | | CWRIAGIGGDMIRHHILEGF | |
| | | | | | | AERFASNGFRATSFVASYGM | |
| | | | | | | AEATLAISFAPLDTGIQTDT | |
| | | | | | | IDLRRLEKDGIAEPSNDPSH | |
| | | | | | | PLRTFVLCGEALPDHQIEVR | |
| | | | | | | DAAGHDLADRQVGTVYVRGP | |
| | | | | | | SLMCGYFRRPDETEAVLDAD | |
| | | | | | | GWLNTGDLGYHLNGQIVVTG | |
| | | | | | | RAKDLIIINGRNIWPQDLEW | |
| | | | | | | SAESEVPSLRSRDVAVFSVD | |
| | | | | | | GDEGEKIVALVQCRATEDES | |
| | | | | | | RNQLRDEVTSLFRRQHGVDV | |
| | | | | | | DVILVPPRTLPQTSSGKLTR | |
| | | | | | | AKAKTMLLSGQFEQQPETTS | |
| | | | | | | SVA | |
| GO_ | GO_ | hypothetical | H | S | Up | MKVAFPLIGQRHQTLHALPI | 40 |
| 1663 | 1663 | protein | | | | ALEVSARHPDVAVHVSCLTV | |
| | | | | | | SHLELARSLATLYPEARVQF | |
| | | | | | | DLLPISPKLRRRIELHGLRV | |
| | | | | | | VDRLIGLFASRHYFRTFDAI | |
| | | | | | | IVPEATSLQLRRMGVGRPKM | |
| | | | | | | IWTGHGAGDRAIGFARHLGK | |
| | | | | | | FDFLLVPGRKVEQRMLEKSI | |
| | | | | | | IRPGAYHRGTYAKFDLVRRM | |
| | | | | | | DAKRPKLFNNNRPTILYNPH | |
| | | | | | | FLRRLSSWPEMGHQVLQFFA | |
| | | | | | | TQDRYNLVFAPHFRLFDNHR | |
| | | | | | | EEGEALRRQYGHLPHMLIDP | |
| | | | | | | GSHRSIDMTYTMGADLYLGD | |
| | | | | | | VSSQVAEFMIRPRPCLFLNA | |
| | | | | | | HHVKWHGNPDYQFWTLGPVT | |
| | | | | | | ENVSDLGSKIENAFETHPRF | |
| | | | | | | LEAQRQYVLETFETLGDEPT | |
| | | | | | | APAAADAIVDFLKRAA | |
| GO_ | GO_ | Mannose-1- | H | S | Up | MSQKIVPVILSGGSGSRLWP | 41 |
| 182 | 182 | phosphate | | | | VSRSSYPKQFWPLLSKYSLI | |
| | | guanylyltransferase | | | | QETALRGARAGLADPIVICN | |
| | | (EC 2.7.7.13)/ | | | | AEHRFIVAEQLRDVGVENAR | |
| | | Mannose-6- | | | | IVLEPVGRNSAPAIAAAAFL | |
| | | phosphate isomerase | | | | VAETDPDAVLWIMAADAAIT | |
| | | (EC 5.3.1.8) | | | | DEAALYSALDHAVAAAGQGR | |
| | | | | | | IVTFGMKPTRVETGYGYIES | |
| | | | | | | GAPLSGLEGVCEVSRFVEKP | |
| | | | | | | DAATAEAFFRDGRYLWNSGM | |
| | | | | | | FVTQAGVFLSEIQTFEPALY | |
| | | | | | | EHVGQAVRTRQSDLDFDRLD | |
| | | | | | | DASFRQAPDISVDYAVAERT | |
| | | | | | | KRAAVVPGTFGWSDIGSWDA | |
| | | | | | | LWELTSKDEAGNATFGDVFL | |
| | | | | | | DDARNCYVRSDGIVATVAGV | |
| | | | | | | EDLIVVVTQDAVMVSHRDRA | |
| | | | | | | QDVKHMVSRLKKAGRKEATA | |
| | | | | | | HNRMYRPWGFYESLIQADRF | |
| | | | | | | QVKRIVVEPGQKLSLQKHFH | |
| | | | | | | RAEHWVVVGGTAVVTRDADQ | |
| | | | | | | IMVRENESVYLPLGCVHRLE | |
| | | | | | | NPGRIPLTLIEVQSGPYLGE | |
| | | | | | | DDIVRIEDVYSRN | |
| GO_ | GO_ | Sensory | H | S | Up | MTVTRSGSPDLNPRRWRRLW | 42 |
| 1993 | 1993 | transduction | | | | YRRDALRSIRMFDTVGARVM | |
| | | histidine kinase | | | | TLIVATTLPLAIIASLLAWH | |
| | | | | | | SYQQNVGNSAMRTERDTQLA | |
| | | | | | | ISEITTDLDQTHTLLDMLAD | |
| | | | | | | GDISSGNALREFALVQTVSQ | |
| | | | | | | HHYCMLMLTDVSGRPSVVLP | |
| | | | | | | PPSTQDAAICSSPELAAPAT | |
| | | | | | | NSPTARTPVVGVDVLKGDRG | |
| | | | | | | PLLKFVVPILSNNSVSGYII | |
| | | | | | | AVRTLGWQRSHLPKGDSRLL | |
| | | | | | | LGTDNNSRHFLAMPDGTLYS | |
| | | | | | | LFPDRPVTAELPARAFARLK | |
| | | | | | | RDISSLSLHDVFTSQGITYA | |
| | | | | | | FQNAYGPVSLIVATERTAEE | |
| | | | | | | SHALNIFLIRVSLIVGLLVL | |
| | | | | | | ELMAVALGARLFLVDPLEKL | |
| | | | | | | ALAVADWRKGAAFAPRISHS | |
| | | | | | | IPLEIRHLERAFLRATRRLS | |
| | | | | | | KHEQDLEQSARNQDMLIREI | |
| | | | | | | HHRVKNNLQVVASLLNLQAS | |
| | | | | | | RIRSHEAREEFRLVRDRVRA | |
| | | | | | | LATLHRYLYSESGLSALDVQ | |
| | | | | | | SFLEELCSILLSANGMNAQT | |
| | | | | | | RIRLQLDIEHVLISPDQAVP | |
| | | | | | | IALIVTEVVSNALRYAFPEN | |
| | | | | | | RAGHIVINLHKVVSTDAEKE | |
| | | | | | | GLVELKLGDDGIGINAGQAT | |
| | | | | | | ESRTRREGIGMQLIRGFARQ | |
| | | | | | | INADMTVSNENGTWYTLRFI | |
| | | | | | | PERPSLTALAMARKAISYGE | |
| | | | | | | DSGL | |
| GO_ | GO_ | Dolichol- | H | S | Up | MAVLNEAENILPVCQELADT | 43 |
| 2191 | 2191 | phosphate | | | | FGADPSAEILAIDDGSTDAT | |
| | | mannosyltransferase | | | | VKKLLEARQTLLPRLRIISH | |
| | | | | | | PKRLGKSAALRTGITAAKGQ | |
| | | | | | | WIATIDGDGQDDPSAILKML | |
| | | | | | | DQATSASGAAPLVVGVRRKR | |
| | | | | | | NDRLSRRIATRFANGLRRRL | |
| | | | | | | LNDGCPDTGAPLKLFPRDLF | |
| | | | | | | LKIPQFEGVHRFLPALLGHY | |
| | | | | | | GAPLICIEVQHRARLHGSSK | |
| | | | | | | YTNFNRALVGIRDLLGVMWL | |
| | | | | | | QNRTHLPDHLTEH | |
| GO_ | GO_ | Diaminopimelate | H | S | Up | MSAPLPSDPATDPSFSDMLE | 44 |
| 2479 | 2479 | decarboxylase | | | | TRPSLKMDARDGLMFEGVPL | |
| | | (EC | | | | HVIAAAVGTPCWITGAETLR | |
| | | 4.1.1.20) | | | | RRAKALRTAFEARNLPVNMH | |
| | | | | | | FAMKSQDHQATLTILRQCGY | |
| | | | | | | GVDIVSGGEMQRALHAGIQP | |
| | | | | | | SGIVFSGVGKSDAELRAAVE | |
| | | | | | | HDIAQVNVESVEELYRLDDI | |
| | | | | | | ARACGRVARAALRVNPDVDA | |
| | | | | | | DTHDKISTGRAGDKFGIEHR | |
| | | | | | | RAVALYGEAASLKNVRLVGL | |
| | | | | | | AVHLGSQMLTATPFREGYAR | |
| | | | | | | LADMVREIRAAGHTVESVDC | |
| | | | | | | GGGLGIRYRDEIAPSPDMLA | |
| | | | | | | GVIAETLGDLDVRLSIEPGR | |
| | | | | | | WLSAPTGILLTRVIETKAGN | |
| | | | | | | PDFVVIDAAMNDLARPSLYE | |
| | | | | | | SWHGIMPVAPSGLTSPTKLW | |
| | | | | | | DIVGPVCESSDIFARDRALP | |
| | | | | | | AETKRGDLIALLDTGAYGSV | |
| | | | | | | MSSTYNTRPLAAQVLIDNGK | |
| | | | | | | WEIIRQRQSVAELIAAETVP | |
| | | | | | | EWLTAKDDHG | |
| GO_ | GO_ | Mitochondrial | H | S | Up | MPDTIEVTRLDNGLTIITER | 45 |
| 2557 | 2557 | processing | | | | MDRVETVSFGAYVSIGTRDE | |
| | | peptidase- | | | | TADNNGVSHFLEHMAFKGTE | |
| | | like protein | | | | RRSASRIAEEIENVGGYINA | |
| | | (EC 3.4.24.64) | | | | YTARETTAYYVKLLKNDLAL | |
| | | | | | | GVDIIGDILTHSTFLDAEIE | |
| | | | | | | RERGVILQEIGQANDTPDDI | |
| | | | | | | IFDQFQERAFPEQPMGRPTL | |
| | | | | | | GSEERVSTMTRDTLMSYMRE | |
| | | | | | | HYTTHNITIAAAGNLHHQQV | |
| | | | | | | VDLVKEHFRDLPTHQTPRPR | |
| | | | | | | AASYEGGELRTPRELDQAHL | |
| | | | | | | VMGFPSVSYMHPDHYAVMIL | |
| | | | | | | STLLGGGMSSRLFQEIRERR | |
| | | | | | | GLVYSVYSFASPFSDSGLFG | |
| | | | | | | LYAGTGEEQTAELVPVMIDE | |
| | | | | | | LKRLQDGLSAEELSRARAQL | |
| | | | | | | KSSLLMSLESTGSRCEQLAR | |
| | | | | | | QIQVHNRPVPTAETVGKIDA | |
| | | | | | | VTEDDILRVARTIFSGTPTF | |
| | | | | | | TAIGPIDNMPSLEDITARLA | |
| | | | | | | A | |
| GO_ | GO_ | NifU protein | H | S | Up | MSGRLERKDMTTMFIETEDT | 46 |
| 3255 | 3255 | | | | | PNPATLKFLPGRSVTGDARP | |
| | | | | | | VDFGDADVAAGRSELATALF | |
| | | | | | | DQPNVRRVFLGGDFVSVTKS | |
| | | | | | | DDISWGDLKPVVLGTITTFF | |
| | | | | | | ESGRPVLSGTQAAPEHDVSP | |
| | | | | | | EDAEVVSRIQDLLDTRVRPA | |
| | | | | | | VAGDGGDIAFRGYKDGVVYL | |
| | | | | | | AMQGACSGCPSSRATLKHGV | |
| | | | | | | ENMLRHYVPEVASVEQVED | |
| GO_ | kdtA | 3-deoxy-D-manno- | H | S | Up | MTLFPRLLRLWLGTCLRTTR | 47 |
| 2438 | | octulosonic acid | | | | WQVSGSPRALETLTTPAQGT | |
| | | transferase | | | | VVAFWHRSLTLSPALWFWAR | |
| | | (EC 2.4.99.12)(EC | | | | TLEPRLELRVLISRNPDGML | |
| | | 2.4.99.13) | | | | IADVVRPWGIIGIHGSSSKK | |
| | | | | | | GKNKGGAAVLRTALKELEAG | |
| | | | | | | SIVAITPDGPRGPAELVQPG | |
| | | | | | | AVALSRLARCAVVPVGMAST | |
| | | | | | | SLRLPSWDGLVFPLPFGRGA | |
| | | | | | | LIMGEPLFQPDAALLQNALN | |
| | | | | | | DVSLRAESVVRHRQSNLADR | |
| | | | | | | LWRVAGTLMAPALTVMLRIR | |
| | | | | | | LHRGRELPGRLRERMGLERT | |
| | | | | | | GPRRGHRPPGQLLWIHAASV | |
| | | | | | | GETLCALPLAEALLEALPEM | |
| | | | | | | RILFTTATVTGSEIVARHPL | |
| | | | | | | YGQRIIHRFIPHDVPRWLRR | |
| | | | | | | FLNLWQPEGAIFVESELWPG | |
| | | | | | | IIAACSRRDIPVMLVNGRLS | |
| | | | | | | DRSARLWTRLGDPARRMMKR | |
| | | | | | | LSWVAARGPEDAARFRALGA | |
| | | | | | | LPVYEDGDLKQDAPPLAYDE | |
| | | | | | | TEYARLESLIGERPVFVAAS | |
| | | | | | | THPGEEELVLQAAERARRLQ | |
| | | | | | | PDLLTIIVPRHPARGAELAA | |
| | | | | | | RFDLPRRAAGQDPTPQTQIW | |
| | | | | | | LADTLGELGLLYRLADRCFL | |
| | | | | | | GNSLAGKGGGHNPFEPLRLG | |
| | | | | | | IPTATGPKMENWREAIATVS | |
| | | | | | | DTIHIVNDVECLTRWLESPL | |
| | | | | | | PPVRTTGLQRSVVSVLRDRI | |
| | | | | | | LKTVER | |
| GO_ | kup | Kup system | H | S | Up | MPEHDGDHASNPPHGVGIPN | 48 |
| 1459 | | potassium | | | | DSGEIVQTIEQARSEGHTHE | |
| | | uptake | | | | IGGEEDGSSHHRPAGMGALL | |
| | | protein | | | | AVLGVVYGDIGTSPLYALQS | |
| | | | | | | SVSIVSSPKAPAQPWEIMGL | |
| | | | | | | ASLTFWALMLIVTIKYVILI | |
| | | | | | | MRADHDGEGGIIALMSLAQR | |
| | | | | | | VCKSQHFRWLFGLVGIAGTC | |
| | | | | | | LFFGDSIITPAISVLSAVEG | |
| | | | | | | IETSVPSASHIIIPLAMVVL | |
| | | | | | | VALFSVQVLGTGKIGKAFGP | |
| | | | | | | IMVCWFSVLAILGIKGIFLY | |
| | | | | | | PHILLALSPTFALEFIIMHG | |
| | | | | | | YLSFIALGSVVLSVTGAEAL | |
| | | | | | | YADMGHFGRAPIRKAWLFFV | |
| | | | | | | LPSLTLNYFGQAALLIRDPH | |
| | | | | | | ALSNPFYLLVPHWAQIPMLI | |
| | | | | | | LATFATVIASQAGISGSFSL | |
| | | | | | | CRQLIQLGYLPRTRIMHTNA | |
| | | | | | | SEEAQIYLPSLNWILAFGAL | |
| | | | | | | VLVLAFRSSSALAAAYGIAV | |
| | | | | | | TGTFLCTCVLAMVVFRRVFK | |
| | | | | | | WKSATVGIVFGFFFIVDSIF | |
| | | | | | | FSANVLKIPDGGWVPLAIGI | |
| | | | | | | ISTIIMTTWKRGRSLIAARQ | |
| | | | | | | QADSMPMGSFLARLPQSRTI | |
| | | | | | | RVPGLAVFLTANPDIVPNSL | |
| | | | | | | LHNLKHNKVLHDHILFVTVE | |
| | | | | | | NLDKPEAERGHRAIVQELAP | |
| | | | | | | NIHRVIVRYGFMEMPNLPRA | |
| | | | | | | LLELNALGVAFDAIQASYFT | |
| | | | | | | SHELVVRSRVPKMQLWRMWI | |
| | | | | | | FLLLLRNAASTTEFLRIPPD | |
| | | | | | | RVVEFGVRIAI | |
| GO_ | mgdH | Glucose | H | S | Up | MSTTSRPGLWALITAAAFAL | 49 |
| 2781 | | dehydrogenase, | | | | CGAILTVGGAWVAAIGGPLY | |
| | | PQQ- | | | | YVILGLALLATAFLSFRRNP | |
| | | dependent | | | | AALYLFAVVVFGTVIWELTV | |
| | | (EC 1.1.5.2) | | | | VGLDIWALIPRSDIVIILGI | |
| | | | | | | WLLLPFVSRQIGGTRTTVLP | |
| | | | | | | LAGAVGVAVLALFASLFTDP | |
| | | | | | | HDISGELPTQIANASPADPD | |
| | | | | | | NVPASEWHAYGRTQAGDRWS | |
| | | | | | | PLNQINASNVSNLKVAWHIH | |
| | | | | | | TKDMMNSNDPGEATNEATPI | |
| | | | | | | EFNNTLYMCSLHQKLFAVDG | |
| | | | | | | ATGNVKWVYDPKLQINPGFQ | |
| | | | | | | HLTCRGVSFHETPANATDSD | |
| | | | | | | GNPAPTDCAKRIILPVNDGR | |
| | | | | | | LVEVDADTGKACSGFGTNGE | |
| | | | | | | IDLRVPNQPYTTPGQYEPTS | |
| | | | | | | PPVITDKLIIANSAITDNGS | |
| | | | | | | VKQASGATQAFDVYTGKRVW | |
| | | | | | | VFDASNPDPNQLPDDSHPVF | |
| | | | | | | HPNSPNSWIVSSYDRNLNLV | |
| | | | | | | YIPMGVGTPDQWGGDRTKDS | |
| | | | | | | ERFAPGIVALNADTGKLAWF | |
| | | | | | | YQTVHHDLWDMDVPSQPSLV | |
| | | | | | | DVTQKDGTLVPAIYAPTKTG | |
| | | | | | | DIFVLDRRTGKEIVPAPETP | |
| | | | | | | VPQGAAPGDHTSPTQPMSQL | |
| | | | | | | TLRPKNPLNDSDIWGGTIFD | |
| | | | | | | QMFCSIYFHTLRYEGPFTPP | |
| | | | | | | SLKGSLIFPGDLGMFEWGGL | |
| | | | | | | AVDPQRQVAFANPISLPFVS | |
| | | | | | | QLVPRGPGNPLWPEKDAKGT | |
| | | | | | | GGETGLQHNYGIPYAVNLHP | |
| | | | | | | FLDPVLLPLGIKMPCRTPPW | |
| | | | | | | GYVAGIDLKTNKVVWQHRNG | |
| | | | | | | TLRDSMYGSSLPIPLPPIKI | |
| | | | | | | GVPSLGGPLSTAGNLGFLTA | |
| | | | | | | SMDYYIRAYNLTTGKVLWQD | |
| | | | | | | RLPAGAQATPITYAINGKQY | |
| | | | | | | IVTYAGGHNSFPTRMGDDII | |
| | | | | | | AYALPDQK | |
| GO_ | mreC | Rod shape- | H | S | Up | MLSIHARQVLAKAVLPILIL | 50 |
| 388 | | determining | | | | LAVGLVLLGLVRRPAVDGVR | |
| | | protein | | | | LMATDFMAPAYHGLVWPQER | |
| | | MreC | | | | VKVWLTDLRGATDLAKENAR | |
| | | | | | | LRDENRALRHWYDVAVALAA | |
| | | | | | | ENGRLKKSLHWIPETVPQYV | |
| | | | | | | TGRVTRDDGGPYSRAVLLDV | |
| | | | | | | GSGHDVRIGDVALDAAGLLG | |
| | | | | | | RVTEVGPHTVRVLMINDDAS | |
| | | | | | | RIPVTLGSSHGDAIMAGDDT | |
| | | | | | | ASPRLIFYPQDHHPVEGERV | |
| | | | | | | ETRGQSTMPAGLPVGTVHYS | |
| | | | | | | APNRPVVVPDADLDRLDIVR | |
| | | | | | | VFDYGDDDSQAPDAPGRVRV | |
| | | | | | | KKLPQNPLTGPLPFSWLPNL | |
| | | | | | | PDMPGRGGQ | |
| GO_ | mreD | Rod shape- | H | S | Up | MVAENSTPHLHSAVEPKQTF | 51 |
| 389 | | determining | | | | RRALDMAARAAMPSLFIVFS | |
| | | protein | | | | AILLSAPFGIPGQAQLQFGI | |
| | | MreD | | | | AMCTVWFWAYSRPRSMPALA | |
| | | | | | | VFLCGLVVEIFSFGPPGTVL | |
| | | | | | | LSLLVIYGVAHHWRYGLSRL | |
| | | | | | | GFIAGWLIFSVFAALASFFQ | |
| | | | | | | WALVCLHAVALLSPAPGLFQ | |
| | | | | | | AALTIGIYPSLTALFVWGRR | |
| | | | | | | TFANPDQA | |
| GO_ | pqqC | Coenzyme PQQ | H | S | Up | MTLLTPDQLEAQLRQIGAER | 52 |
| 2303 | | synthesis | | | | YHNRHPFHRKLHDGKLDKAQ | |
| | | protein C | | | | VQAWALNRYYYQARIPAKDA | |
| | | | | | | TLLARLPTAELRREWRRRIE | |
| | | | | | | DHDGTEPGTGGVARWLMLTD | |
| | | | | | | GLGLDRDYVESLEGLLPATR | |
| | | | | | | FSVDAYVNFVRDQSILAAIA | |
| | | | | | | SSLTELFSPTIISERVSGML | |
| | | | | | | RHYDFVSEKTLAYFTPRLTQ | |
| | | | | | | APRDSDFALAYVRENARTPE | |
| | | | | | | QQKEVLGALEFKCSVLWTML | |
| | | | | | | DALDYAYVEGHIPPGAFVP | |
| GO_ | pqqE | Coenzyme PQQ | H | S | Up | MTLPSPPMSLLAELTHRCPL | 53 |
| 2305 | | synthesis | | | | SCPYCSNPLELERKAAELDT | |
| | | protein E | | | | ATWTAVLEQAAELGVLQVHF | |
| | | | | | | SGGEPMARPDLVELVSVAQK | |
| | | | | | | LNLYSNLITSGVLLDEPKLE | |
| | | | | | | ALDRAGLDHIQLSFQDVTEA | |
| | | | | | | GAERIGGLKGAQARKIAAAR | |
| | | | | | | LIRASGIPMTLNFVVHRENV | |
| | | | | | | ARIPEMFALARELGAGRVEI | |
| | | | | | | AHTQYYGWGLKNRDALLPSR | |
| | | | | | | DQLEESTRAVEAERAKGGLS | |
| | | | | | | IDYVTPDYHADRPKPCMGGW | |
| | | | | | | GQRFVNVTPSGRVLPCHAAE | |
| | | | | | | IIPDVAFPNVKDVTLSEIWN | |
| | | | | | | LSPLFNMFRGTDWMPEPCRS | |
| | | | | | | CERKERDWGGCRCQALALTG | |
| | | | | | | NAANTDPVCSLSPFHNLVEK | |
| | | | | | | AATGVPEKPELLYRRF | |
| GO_ | tldD | TldD protein, | H | S | Up | MSVAADALGGLATTDALFFG | 54 |
| 2196 | | part of | | | | RSDSKLTRDDARALVNRGLD | |
| | | TldE/TldD | | | | GVDDGELFLEYRENESISLD | |
| | | proteolyticcomplex | | | | DGTIRSASFNTSSGFGLRAV | |
| | | | | | | LGTETAFAHADDISRDALER | |
| | | | | | | AVSTVGAVRQGRSGIMAPGP | |
| | | | | | | QATNQRLYGDSRPLEGTDFA | |
| | | | | | | ARAAVLSEIDAYARGLDSRV | |
| | | | | | | VQVSAVLSSEWQAVQIMRRA | |
| | | | | | | DSGGDVADLRPLVRMNVSVV | |
| | | | | | | VEKDGQRESGSCGLGGRYEL | |
| | | | | | | DRLLAPETWRDAVDKALKQA | |
| | | | | | | LITLEATPAPAGEMDVVLGP | |
| | | | | | | GWPGILLHEAVGHGLEGDFN | |
| | | | | | | RKGTSSFSGMIGKRVASPGV | |
| | | | | | | TVVDDGTLPERRGSLSVDDE | |
| | | | | | | GTPTSRTVLIEDGILTGYLQ | |
| | | | | | | DRLNARLMGTKSTGNGRRES | |
| | | | | | | YAHAPMPRMTNTLMLEGSAT | |
| | | | | | | TDEMIRSMKRGLYAVNFGGG | |
| | | | | | | QVDITSGKFVFAASEAYLVE | |
| | | | | | | EGKIVRPVKGATLIGNGADA | |
| | | | | | | MNQISMIGSDVALDPGIGTC | |
| | | | | | | GKAGQGVPVGVGQPTLKISG | |
| | | | | | | LTVGGTA | |
| GO_ | tldE | TldE protein, | H | S | Up | MTTTPVEALLAAARRHGADH | 55 |
| 2558 | | part of | | | | ADAILVRDESESALVRKGVP | |
| | | TldE/TldD | | | | EGIERSESVALGLRVFRGKR | |
| | | proteolyticcomplex | | | | AATVSTSVLNEAEFDRLAEQ | |
| | | | | | | ACAMALVVPEDQYAGLAEAA | |
| | | | | | | LQGRFDAVGLDLECSSAPSM | |
| | | | | | | DDLLARAREAEDTALSFEGI | |
| | | | | | | TNTNGASAGHGRTSVALGTS | |
| | | | | | | AGFFGAYSRTGHSTSASVLA | |
| | | | | | | GEGATMQRDYAYRSAVHLED | |
| | | | | | | LESPAVIGREAAERVLARIN | |
| | | | | | | PGRPRTGTYSVIYDPRVSST | |
| | | | | | | LLGHLVGAINGAAIARGTSF | |
| | | | | | | LKDSLGKQILSAGLTVHDDP | |
| | | | | | | RRIRGAASRPFDAEGCAALP | |
| | | | | | | LDLIADGVLQTWLLDSRSGR | |
| | | | | | | QLNMPTNGRASRGVASPPSP | |
| | | | | | | SVTNLHLAPGTLSSVALRSD | |
| | | | | | | ISEGILITELMGSSVNMLTG | |
| | | | | | | DYSRGASGFMIRNGEIAEPV | |
| | | | | | | AELTVAGNLKDMFARMIPGS | |
| | | | | | | DLMFRQSVNAPSIRIDGMNI | |
| | | | | | | AGL | |
| GO_ | GO_ | Tryptophan | H | S | Up | MTNTPSPLSSPLANSLRSGP | 56 |
| 2863 | 2863 | synthase | | | | DDRGRFGIFGGRFVAETLMP | |
| | | beta chain | | | | LLLELDEAYRAAQADPEFRR | |
| | | (EC | | | | ELDYYLKDYVGRPSPLWFAQ | |
| | | 4.2.1.20) | | | | HLTEELGGAKVYFKREELNH | |
| | | | | | | TGSHKLNNVMGQILVARRMG | |
| | | | | | | KTRIVAETGAGQHGVATATV | |
| | | | | | | CALFGLKCTIYMGATDVERQ | |
| | | | | | | KPNVFRMHLLGAEVKPVTAG | |
| | | | | | | AGTLKDAMNEAMRDWVANVA | |
| | | | | | | DTYFLVGTVAGPHPYPEMVR | |
| | | | | | | DFQSVIGVEVKEQITQAEGR | |
| | | | | | | LPDVIVAAIGGGSNAMGIFH | |
| | | | | | | PFLDDASVRLIGVEAAGHGL | |
| | | | | | | DSGKTAASISRGRPGVLHGN | |
| | | | | | | RTYLLQDKHGQIEEAHSISA | |
| | | | | | | GLDYPGIGPEHSWLNDIGRA | |
| | | | | | | EYVGVTDEEALEAFQVCTRT | |
| | | | | | | EGIIPALECAHGLAHVMKIA | |
| | | | | | | PAMAKDQIIVLNVSGRGDKD | |
| | | | | | | IFTVAHHLGVKL | |
| GO_ | atu4171 | ATP-dependent | H | | Up | MPFPDTHPALKRALEARGYE | 57 |
| 673 | | RNA | | | | QLTPVQEAVLQPGLDERDLL | |
| | | helicase | | | | VSAQTGSGKTVAFGLAIAPT | |
| | | Atu4171 | | | | LLGDADRLPPSPQPMALVIA | |
| | | | | | | PTRELALQVQSELKWLYAET | |
| | | | | | | GARIASCIGGTDARSEAREL | |
| | | | | | | NRGVHIVVGTPGRLCDHLSR | |
| | | | | | | GSLDLSALRCVILDEADEML | |
| | | | | | | DMGFRDELEKLLDAAPTERR | |
| | | | | | | TLLFSATIAREIASLARRYQ | |
| | | | | | | KNAERIDTVSGAKQHSDITY | |
| | | | | | | RCVITQPQEIERSLVNVLRF | |
| | | | | | | YESPTAMVFCNTRMMVNQVQ | |
| | | | | | | ATLLERGFASVAISGEMGQN | |
| | | | | | | ERSRAIESLRSGQARVCVAT | |
| | | | | | | DVAARGIDVPALNLVIHASI | |
| | | | | | | PTAAETLLHRSGRTGRAGRK | |
| | | | | | | GTSVLMVPLNQRRRAERLLQ | |
| | | | | | | MAKIQAEWEAVPTADAIAEQ | |
| | | | | | | DKTRLMHDPILTNAVDDMSD | |
| | | | | | | ELVNQLVETYDATKLAAALV | |
| | | | | | | GLYRARLPKVEQIRPMSVEA | |
| | | | | | | PRRTERGERAPREEHTMSGE | |
| | | | | | | WFKMGVGRTERADPKWLIPL | |
| | | | | | | ICRLGGVQKREIGSIRIDQE | |
| | | | | | | QTYFQIADESVARFKSCLAG | |
| | | | | | | AEADEVTIEPSEAPAGGMGP | |
| | | | | | | RGRNPGEGKRFGGGGRSGGG | |
| | | | | | | FKGGPRGGAGGGYKGRGGSG | |
| | | | | | | YGRPKPAAGDGPRGDGSSRK | |
| | | | | | | RRS | |
| GO_ | ccmA | ABC transporter | H | | Up | MTSPSDFPPPPVPGRLLDVE | 58 |
| 1481 | | involved in | | | | DVTVFRGDRLVLDGLSLTLD | |
| | | cytochrome | | | | AGDAMILTGPNGAGKSTLLR | |
| | | cbiogenesis, | | | | TISGLRRPDSGEVIRYGDLA | |
| | | ATPase | | | | WLGHQDALKPGLTLAQNLAL | |
| | | component CcmA | | | | AEKLGTNSLPDALEALDLTH | |
| | | | | | | LTDLPARLLSSGQKRRAAFA | |
| | | | | | | RVMLSGAPLWLLDEPTVGLD | |
| | | | | | | VASIERLGAVMAAHRAKGGA | |
| | | | | | | MIVTTHVPLPLDNTRSHELP | |
| | | | | | | SLAHVESFWLS | |
| GO_ | clpX | ATP-dependent Clp | H | | Up | MSNKSGDSKNTLYCSFCGKS | 59 |
| 1879 | | protease ATP- | | | | QHEVRKLIAGPTVFICDECV | |
| | | binding subunit | | | | ELCMDIIREEHKTHLVKSRD | |
| | | ClpX | | | | GVPTPKEICKVLDDYVIGQF | |
| | | | | | | EAKRALSVAVHNHYKRLAHA | |
| | | | | | | AKSSDIEIAKSNILLIGPTG | |
| | | | | | | SGKTLLAQTLARILDVPFTM | |
| | | | | | | ADATTLTEAGYVGEDVENII | |
| | | | | | | LKLLQSADYNVDRAQRGIVY | |
| | | | | | | IDEIDKISRKSDNPSITRDV | |
| | | | | | | SGEGVQQALLKLMEGTVASV | |
| | | | | | | PPQGGRKHPQQEFLQVDTTN | |
| | | | | | | MLFICGGAFAGLDKIISARG | |
| | | | | | | KGSGIGFGADVRSDDERRLG | |
| | | | | | | AILQSVEPEDLLKFGLIPEF | |
| | | | | | | IGRLPVIAALNDLDESALIQ | |
| | | | | | | ILSKPKNALIKQYGRLFEME | |
| | | | | | | GVKLTFTEDALAAIAKRAIE | |
| | | | | | | RKTGARGLRSILENILLGTM | |
| | | | | | | FDLPGLEGVEEVVINREVAE | |
| | | | | | | SKAQPVYVYGKGKSEPAEQS | |
| | | | | | | A | |
| GO_ | cysG | Precorrin-2 oxidase | H | | Up | MNTQPHHSSPDSPQDGGWFP | 60 |
| 1671 | | (EC 1.3.1.76) | | | | ISIRLSGARVLLVGGGEIAV | |
| | | Sirohydrochlorin | | | | NKGRLLLDHGAWIDVLAEKL | |
| | | ferrochelatase | | | | HPVVQGWVESGRVCHVGERA | |
| | | activity of CysG | | | | DDEVLRRLLPGCRLVYAATD | |
| | | (EC 4.99.1.4)/ | | | | SRDTNRQVAALADELNIPVC | |
| | | Uroporphyrinogen-III | | | | AVDDPGPSSFITPAQVRRGM | |
| | | methyltransferase | | | | VRVAVSTEGAAPVLARRLRE | |
| | | (EC 2.1.1.107) | | | | QIETLLPEGTGRLAAYMQSR | |
| | | | | | | RVLVSGRYPNVQDRKRIWED | |
| | | | | | | FLDGPAAEAARSGDESRADA | |
| | | | | | | RLEALLNGDRKPGEVWLVGA | |
| | | | | | | GPGDPDLLTLKALHLMQNAD | |
| | | | | | | SVLYDNLVSPALLDMVRRDA | |
| | | | | | | ELVFVGKQRDRHALPQDEIN | |
| | | | | | | REMVRRAQAGERVLRLKGGD | |
| | | | | | | PFIFGRGGEEIEALVAAGVA | |
| | | | | | | FRLVPGISAANGCAAYSGIP | |
| | | | | | | LTHRDCAQACLFVTGHAKAD | |
| | | | | | | GVLDLPWDDMADRRQTVVIY | |
| | | | | | | MGISTLPQLAAGLLGKGLPA | |
| | | | | | | DWPVAIVERGTQPGQRVFTG | |
| | | | | | | TLATIAQQAAEAQVKSPALV | |
| | | | | | | IVGQVVRHRVVSP | |
| GO_ | DbsA | Periplasmicthiol: | H | | Up | MTRLSLSRRFFVSAAPALAV | 61 |
| 1605 | | disulfide | | | | AGTAAGTARAAGTGSTDARL | |
| | | interchange | | | | SPRIIGNPNAKVLVQEWFSL | |
| | | protein | | | | TCTHCAHFATEEFPKIKEQL | |
| | | DsbA | | | | IDTGKIRYQFHDFCGDRVGL | |
| | | | | | | TAAMVARSLPEERYVPFLEA | |
| | | | | | | LFSSQMQWAFAAGGDPMQRL | |
| | | | | | | QQMSALAGVSAAQFDAISKD | |
| | | | | | | NVFAEALFDQVKKDSDTYNI | |
| | | | | | | QGTPYFRFNNTHYDQDPETY | |
| | | | | | | EKFADLVAKAS | |
| GO_ | dusB | RNA- | H | | Up | MTASAPSAAPDAPAAAPPNR | 62 |
| 171 | | dihydrouridine | | | | VLKPIDLGQGVVIEDPVILA | |
| | | synthase | | | | PLSGVTDLPFRQLARDLGAG | |
| | | DusB | | | | LVVSEMIASWAMIRENENTM | |
| | | | | | | RMARMAERGPNAVQLAGCDP | |
| | | | | | | EAMAQAAKISVDGGANLIDI | |
| | | | | | | NFGCPVKKVAIGQMAGSALM | |
| | | | | | | RDEVLAGKLLEATARAVNVP | |
| | | | | | | VTLKMRMGWDHNSLNAPRLA | |
| | | | | | | KIAEESGIRLVTVHGRTRQM | |
| | | | | | | FYNGTADWRFVKTVKDAVSL | |
| | | | | | | PVIVNGDINTIRDAREALHQ | |
| | | | | | | SQADGVMIGRGCYGRPWFTA | |
| | | | | | | QVAQSLRTGEDVLDPDLATE | |
| | | | | | | KEIALRHYRMMLDHFGERPG | |
| | | | | | | LRLARKHVSWYSAGLPGSAT | |
| | | | | | | FRSTINGVESAAEAIALLTA | |
| | | | | | | FYDRHIEAGVVRNREAGPTG | |
| | | | | | | SLSRDGTREAA | |
| GO_ | envC | Murein hydrolase | H | | Up | MKAPDPRPFLPLVLLLSPGW | 63 |
| 2710 | | activator EnvC | | | | AAAHHASHHHARHTEKPAVA | |
| | | | | | | AASEGQKALARAQAARRTLE | |
| | | | | | | KRQADEAAVLKAKQIASAQA | |
| | | | | | | EAKARQDNARTLAFTAQTHT | |
| | | | | | | AQSAVDTTQSRILALKASIA | |
| | | | | | | ELMDKRTAVEADIRQQNAAL | |
| | | | | | | QPLLPVAARLSIAPDAALLA | |
| | | | | | | SPETASESVTALSVLGGFSR | |
| | | | | | | LTQQRAQALQSREDELHAIG | |
| | | | | | | IDLDSRQKELAELLAQQTRE | |
| | | | | | | RNAAAARTRIAARQEAVADQ | |
| | | | | | | GAQKARKAVADAMQAAADLS | |
| | | | | | | AEIDALVRQEAQARAELEKE | |
| | | | | | | AAALTRQHQLERARHARSQA | |
| | | | | | | QALSSSGQGVSSGSGHAPVS | |
| | | | | | | GRVAVRWGQTTEAGPATGIT | |
| | | | | | | YAALSSTPVQAPCTGRVEFA | |
| | | | | | | GPFRSFGQMLILDCGRNYRF | |
| | | | | | | VLSGLGQLNVSGGQSIRKAA | |
| | | | | | | TLGQMPAADGMLFVQLRHGT | |
| | | | | | | QVVSPAPFL | |
| GO_ | ftsE | Cell-division- | H | | Up | MIRLLNVSMMPPGVGQPVLR | 64 |
| 2773 | | associated, ABC- | | | | NLTLTVAQGEFRWLLGPSGA | |
| | | transporter- | | | | GKSSLLRLLTLETRPSAGQM | |
| | | like | | | | DLLGMSVSQASRATLRNLRR | |
| | | signaling | | | | RIGFVPQDYRLIGEWTVFDN | |
| | | protein | | | | VALPLRLRGASERDTRREAF | |
| | | FtsE | | | | AVLEWLDVAHLADKRPGTLS | |
| | | | | | | GGEQQRAAIARALIGRPEIL | |
| | | | | | | LADEPTNALEDAQARRLLAT | |
| | | | | | | FQELVDMGTTVIVATHNEAL | |
| | | | | | | VREAPAASIVLQDGTLADAD | |
| | | | | | | TQDGIAARRSDRA | |
| | GO_ | 3-phosphoshikimate | H | | Up | MQVSRPLTVSASPKGLSGRT | 65 |
| | 1058GO_ | 1- | | | | RVPGDKSISHRSLMFAALAS | |
| | 1058 | carboxyvinyl | | | | GRTYVTGLLEGEDVLRTADA | |
| | | transferase | | | | MRALGATITREGADWVIEGR | |
| | | (EC 2.5.1.19) | | | | GVGALTEPADVLDMGNSGTA | |
| | | | | | | ARLLSGILSSHGFNSIMTGD | |
| | | | | | | ASLRSRPMRRVTVPLAANGS | |
| | | | | | | EFLTREGGRLPMAVRGTGEA | |
| | | | | | | KPIEYRLPVASAQVKSAILL | |
| | | | | | | AGLNAHGTTVVEEPVATRDH | |
| | | | | | | TENMLRHFGVEVDVSRIDAG | |
| | | | | | | GRRIALTGPVRMTARDVTVP | |
| | | | | | | GDPSSAAFPIVAALLVPGSD | |
| | | | | | | IWIEGVGLNPLRTGLFTTLI | |
| | | | | | | EMGASLSIENERVEGGEPVG | |
| | | | | | | DLHVRYSQLKGVDVPPERAP | |
| | | | | | | SMIDEYPVLAVACAFAEGPS | |
| | | | | | | RLRGLEELRVKESDRLASTV | |
| | | | | | | ALLNVNGAETEVIGDDLIVK | |
| | | | | | | GHHGPLGGGTVQTHMDHRLA | |
| | | | | | | MSAVVLGLAAQKPVNVDDTA | |
| | | | | | | FIETSFPGFVDLMNALGAGL | |
| | | | | | | TP | |
| GO_ | GO_ | Fructokinase (EC | H | | Up | MSAPQHDLLCIGNAIVDVLA | 66 |
| 1072 | 1072 | 2.7.1.4) | | | | PVGQDLIDGLGAAAGSMTLI | |
| | | | | | | DAPTAHAIESRVDIENVTGG | |
| | | | | | | GSGANTAVVAARMGAKVAYL | |
| | | | | | | GKVTADEAGDHFTRDIREQG | |
| | | | | | | ITFPSEPLPAADGTPTARCI | |
| | | | | | | VLVTPEGQRTMFTYLGACTE | |
| | | | | | | FTPEDVHESVVADAAITYLE | |
| | | | | | | GYLYDKPHAQEAFEHAARLA | |
| | | | | | | RKAGRQVALTLSDTFCVERH | |
| | | | | | | RAAFHELVAGHVDILFANEA | |
| | | | | | | ELLALYEVTDFEEAITQVST | |
| | | | | | | ETKLAVITRGEKGAVVIGDG | |
| | | | | | | ERHDVPTTEVKVVDTTGAGD | |
| | | | | | | AFAAGFLAGLSKKHDLVTCA | |
| | | | | | | KLGNQAAGEIITRYGARPTE | |
| | | | | | | TFTLTA | |
| GO_ | GO_ | Fe-S oxidoreductase | H | | Up | MMRTLFLQPPSFDGFDGGAG | 67 |
| 1074 | 1074 | | | | | SRYQAKREIKSFWYPTWLAQ | |
| | | | | | | PAALVPGSRLIDAPPAKMGM | |
| | | | | | | DPILEDVKNRDLVVMHTSTP | |
| | | | | | | SFASDVRVAQMLKDANPRLM | |
| | | | | | | IGMVGAKVAVQPMESMEKGG | |
| | | | | | | PIDFVARNEFDFTIKEIAEG | |
| | | | | | | KPLAEVDGITWRNEKGEIIA | |
| | | | | | | NKDRAMIEDMDSLPFVTEVY | |
| | | | | | | KRDLNINDYFIGYLKHPYIS | |
| | | | | | | IYTGRGCKSRCTFCLWPQTV | |
| | | | | | | GGHRYRTRSPEHVAAEVRLA | |
| | | | | | | KQYFPEVQEFMFDDDTFTDD | |
| | | | | | | LPRAEAIAREMGKLGVTWSC | |
| | | | | | | NAKANVPYETLKVLKENGLR | |
| | | | | | | LLLVGYESGNQQILHNIKKG | |
| | | | | | | MRVETAKEFTRNCHKLGIKI | |
| | | | | | | HGTFIVGLPGETKETIQETI | |
| | | | | | | EFAKEINPHTLQVSLAAPYP | |
| | | | | | | GTFLHKQATENGWLNEAEAE | |
| | | | | | | LIDESGVQIAPLHYPHLSHT | |
| | | | | | | EIFESVEEFYRKFYFRGSKI | |
| | | | | | | ASIVNEMVRSPQMMKRRLRE | |
| | | | | | | GVEFFQFLKDRHAA | |
| GO_ | GO_ | Ceramide | H | | Up | MPLPLTIAAGFCALVSAAGN | 68 |
| 1075 | 1075 | glucosyltransferase | | | | LQALAGATLLARFRRTERKA | |
| | | (EC 2.4.1.80) | | | | DDALRLSDRIWPSVTVLKPL | |
| | | | | | | HGNEPLLEDALESVFTQDYP | |
| | | | | | | DFQIVFGVQDREDTALAVIE | |
| | | | | | | RLRARHPRIPVSVVIDPQEH | |
| | | | | | | GPNRKVGNLMNMYGEVRHDI | |
| | | | | | | IVISDSDIHASPNYLRHVVT | |
| | | | | | | SLEEQGTGLVTTLYAGRPAA | |
| | | | | | | GTLVQQLGACQINHNFLPGV | |
| | | | | | | MMSRFLGRQDCLGATMALRR | |
| | | | | | | QTLEEIGGLEALVDHVADDA | |
| | | | | | | ELGQLIRVRGENITIAPTLT | |
| | | | | | | HTTVGEHSISDLLAHELRWG | |
| | | | | | | RTVKNVAPVGYGLSAIQLPL | |
| | | | | | | FWAVTAVLFRPNAWWTWFML | |
| | | | | | | LLTWLVRAIGSRIMDRATEC | |
| | | | | | | PLPAAIPLLVVRDWLSAAIM | |
| | | | | | | VGSARGSRVAWRGRTVHIAR | |
| | | | | | | RKRNSASCAPSLQAGATHRS | |
| | | | | | | VRS | |
| GO_ | GO_ | hypothetical | H | | Up | MDGPWLSSLSRLRKVGKHEG | 69 |
| 1077 | 1077 | protein | | | | PSSIRLTAYRPIVVFASMSG | |
| | | | | | | CIIRIRAVANRAQMDLWMPE | |
| | | | | | | LVTGNLIQCVMNLISTHGTV | |
| | | | | | | YRTKARS | |
| GO_ | GO_ | NADPH- | H | | Up | MPDHQPTGPSAPGTDALSQL | 70 |
| 1097 | 1097 | dependent 7- | | | | GRATTTPQSPEEAVLERVPS | |
| | | cyano-7- | | | | PHQGRQYVVRFTAPEFTSLC | |
| | | deazaguanine | | | | PVTGQPDFAHIVIDYIPGEW | |
| | | reductase | | | | IVESKSLKLFLTSFRNHGAF | |
| | | (EC 1.7.1.13) | | | | HEDCSIAIAERLVALLDPQW | |
| | | | | | | LRIGAYWYPRGGIPIDVFWQ | |
| | | | | | | TGEPPKGVWIPAQDVPGYRG | |
| | | | | | | RG | |
| GO_ | GO_ | Histidine | H | | Up | MMDLVEGTEEASGALMLPPA | 71 |
| 1106 | 1106 | kinase/response | | | | PAVGRASILCVHLLALAAAE | |
| | | regulator | | | | GGGEAALLLRDADGVRVLGG | |
| | | hybridprotein | | | | EGSAIAAEGAACLMDGQSLD | |
| | | | | | | ACTVRLLPVRSGAVEVWLCV | |
| | | | | | | RRNAPALEHVLALCALQVDD | |
| | | | | | | LLRERAAAPQSGEHELVERM | |
| | | | | | | QLRMQRMADTADVAFYRCDF | |
| | | | | | | ATRVVTGDARFASLWGLPPE | |
| | | | | | | RLAVGVPIDELLMFLHPDDR | |
| | | | | | | LVYDGSLEDELRDEGCYELR | |
| | | | | | | FRILVSSPSMPGSGQAQSRS | |
| | | | | | | PRSSLLRHVLLRGWREDESR | |
| | | | | | | PDSRRSVGLAMDVSSASMTA | |
| | | | | | | EALRSSEAFTRLLLSSLPDC | |
| | | | | | | IHILDCEGCIRFVNEGGIRS | |
| | | | | | | MEMDSPIIMHGLPWVDLWRG | |
| | | | | | | QPRRRAALAVQTALAGETAR | |
| | | | | | | FQGYAMTMRGQRRFWDVAVT | |
| | | | | | | PVFGEDGDVRRLLAIGRDLT | |
| | | | | | | EANQSAERLQLALEAGAIAG | |
| | | | | | | TWMWDDSTSRMTGDARLAQT | |
| | | | | | | LGLDPARMREGVMPNVIYDS | |
| | | | | | | VDPRDRFAVVQAVTAATRRG | |
| | | | | | | GKCRFEFRVDTPEGQRWFEG | |
| | | | | | | NGRCDLGDEGRVARFPGIVF | |
| | | | | | | DIDRSKRQALRQAALVELGD | |
| | | | | | | QLRALDDTSMMEEVAARIIC | |
| | | | | | | RELDASGAGYGVVNDDWTGM | |
| | | | | | | TVGGAPEVTRPLVGMRMFAD | |
| | | | | | | YGEFRPILGRGEPVAIADVH | |
| | | | | | | TDALTAGYDARYDAEGIVAI | |
| | | | | | | LCVPIFKFGRFVGLMFVCHD | |
| | | | | | | APHIWTDEEIVFTRAVADRT | |
| | | | | | | HASMRQARTQQQIRDLNVML | |
| | | | | | | EERILQRTRERDRLWNIARD | |
| | | | | | | LFIIIDRRGYYVAVSPSWEE | |
| | | | | | | TQGYRVDELAGLRLDALCHP | |
| | | | | | | DDRRMVLDTFERLLAGTPWP | |
| | | | | | | TAGLDVRMRRSDGTWRTYNW | |
| | | | | | | NCNDEGDAIYAVGRDLTERN | |
| | | | | | | ELEEQLRQAQKMEAVGQLTG | |
| | | | | | | GLAHDFNNLLAGIGGGLELI | |
| | | | | | | GLRLAQGRTDGLGRYIAASQ | |
| | | | | | | DAVRRAASLTHRLLAFSRRQ | |
| | | | | | | TLDPTPTDMNALVRGLESLL | |
| | | | | | | RGTVGPGIELLFDLQPGLWL | |
| | | | | | | TRVDANQLENAILNLCINAR | |
| | | | | | | DAMHDRGTMLRLESANRVLT | |
| | | | | | | ADVATDMSIRAGDYVVLTVQ | |
| | | | | | | DEGCGMPPEIVQRAFDPFFT | |
| | | | | | | TKPLGEGTGLGLSMIYGFTQ | |
| | | | | | | QSGGQVEIHSTPGQGTVVSL | |
| | | | | | | WLPRYQGQETIRPEPPLLPV | |
| | | | | | | ASQPRLLEGQRVLVVDDEEA | |
| | | | | | | VRMIVSDMVTDLGGIVLTAS | |
| | | | | | | DGPSAEALAAEGVPPAVLIS | |
| | | | | | | DIGMPGGMNGRELGEQMLKR | |
| | | | | | | WPGLKVLFITGYAEQSVLGD | |
| | | | | | | QALVPGCALLVKPFTVAAFS | |
| | | | | | | RKLAVLLKGD | |
| GO_ | GO_ | DNA protection | H | | Up | MVSRTDRHVTQNNTADNTKN | 72 |
| 1168 | 1168 | during starvation | | | | VSIETLNARLSDLIDLALIT | |
| | | protein | | | | KQAHWNLKGPQFIGVHEMLD | |
| | | | | | | GFRSSIDGFSDTVAERAVQL | |
| | | | | | | GGTALGTVQDVSKNSACKPY | |
| | | | | | | PNNIYRVADHLAALIDRYAT | |
| | | | | | | VANNMRESIKVTDEAGDDDT | |
| | | | | | | ADVFTEVSRGLDKHLWFLEA | |
| | | | | | | HVQEPTGQMRDGDHKGSRS | |
| GO_ | GO_ | hypothetical | H | | Up | MSFKRRLSALLSSRGKLEYA | 73 |
| 1174 | 1174 | protein | | | | IHLTETGQAVQGFALLSRLA | |
| | | | | | | ATGDAEAAFRVGRAYLDGLG | |
| | | | | | | VPPSLEDGARWIYQAAEAGH | |
| | | | | | | IEAAFVLATLYTVGLPEGFE | |
| | | | | | | IRTAGEGLDLSHVPQVGPRH | |
| | | | | | | PDFHLGLRWAKIAADAGSPD | |
| | | | | | | AQALLGYILTNGPEDLRDLT | |
| | | | | | | QARSWYDRSAAAGCSQGHLG | |
| | | | | | | VALSILHEAHSDEDLSAAAR | |
| | | | | | | HLIEATKGGLGTAFDILGRM | |
| | | | | | | YESGSGVPRDLGKAASYFHQ | |
| | | | | | | AAERNIVTAQARYGLMLLEG | |
| | | | | | | TGTPRHYGRAETWLKRAAAN | |
| | | | | | | GDTQSAALLGDLCANGGDLP | |
| | | | | | | PNLMEASKWYRLAAEQKHAG | |
| | | | | | | AARALGLLYLTGNGVHQDPD | |
| | | | | | | VAAHWFRVASEAGDAHADAD | |
| | | | | | | FGNLILAGASATPDEKQALH | |
| | | | | | | ARFEKAAEKGDLVGAYNLGV | |
| | | | | | | CFAEGVTGTKDGREAARWMQ | |
| | | | | | | KAADGVVNAQYWYGRMLLEG | |
| | | | | | | RGVQPDPTQALYWMEKAANA | |
| | | | | | | GMAEAQVTVAGLLVDGSING | |
| | | | | | | RQDHEKALTLYRKAAESGNV | |
| | | | | | | DAMFSLAAMYGGGHDVPENR | |
| | | | | | | PQAQLWFRKAAQRGNGLAQM | |
| | | | | | | MLGRYLVRGLAGVTDPVEGR | |
| | | | | | | IWLERAKAQNIRDAEVELAL | |
| | | | | | | LDEAQPDDDD | |
| GO_ | GO_ | Bacteriocin/ | H | | Up | MEHTQSLSGPDGRVSPTVIR | 74 |
| 1176 | 1176 | lantibiotic | | | | LYAVLAAARYHGLELDIRDF | |
| | | efflux ABC | | | | AAEPGEDSPSPATLARWLNE | |
| | | transporter, | | | | QGAVAKGMRLRWRYLVKIRN | |
| | | permease/ | | | | SPPVVLMFKDGSAGLMVRAD | |
| | | ATP-binding | | | | AEKSVVWLRDPMGGEGDTPV | |
| | | protein | | | | PVDELRLMQVWTGDVLLVKR | |
| | | | | | | RRDESEADAKFDLLWFAKMV | |
| | | | | | | LREKKVMRDIAFASLILSIL | |
| | | | | | | QIFPALIVMQVVDRVVNYHS | |
| | | | | | | MATLVSLSGFVIILSFYEIL | |
| | | | | | | LTYARRELSLILSTRLDARI | |
| | | | | | | SLHAFNRLLALPLEFYEREQ | |
| | | | | | | TGEILGRFMAVFKVRDFLTG | |
| | | | | | | QLMSTLLDLFTLIVVLPVLF | |
| | | | | | | VMSPTLAWMTLAAAGCIGLI | |
| | | | | | | VVVFLPPVTRVIGRQVLAEM | |
| | | | | | | KRGSILYETVAGIRTVKTLA | |
| | | | | | | LETTRRELWDERTADVVRWK | |
| | | | | | | LAAGRMASWPQTLVMPFEIF | |
| | | | | | | INRGIILVGAYLILTNASSM | |
| | | | | | | QAGALMGFMMLGGRVASPLV | |
| | | | | | | NLAKLMEAFNEVSVSLSEAG | |
| | | | | | | MVLNQPTETKALTTGMRPVV | |
| | | | | | | KGALSFNHVDFSYPGSTTKA | |
| | | | | | | LNDVTFDIPAGTMLGLVGRS | |
| | | | | | | GSGKSTITRLLQGVSRNYTG | |
| | | | | | | YLRLDGVDLREINLTHLRRS | |
| | | | | | | FGVVLQDNFLFRGTIRDNIT | |
| | | | | | | AGRPGLTIDDAIRAARLAGA | |
| | | | | | | EEFIERMPAGYDTWIEEGST | |
| | | | | | | NISGGQRQRLAIARAVISDP | |
| | | | | | | KLMILDEATSALDPESEALV | |
| | | | | | | NANLQRIGKGRTMVIVSHRL | |
| | | | | | | SSLVNCHQIAVMDQGKLVDI | |
| | | | | | | APHRILLERCEIYRMLWLQQ | |
| | | | | | | NRHMTDNDVPGSAGQLTEGE | |
| GO_ | GO_ | O- | H | | Up | MSSENWRTATRLLHEAPNRT | 75 |
| 1380 | 1380 | succinylhomoserine | | | | EFGETSEALFLTSGFVYDSA | |
| | | sulfhydrylase | | | | EQAAATFTGDVQHFQYSRFG | |
| | | | | | | NPTVDTLQERLALLEGAEAC | |
| | | | | | | VATATGMGAVSSAILSTVKA | |
| | | | | | | GDRVVASRAIFGSCYWIVTN | |
| | | | | | | LLPRYGIETELVDGTDYDAW | |
| | | | | | | ERALSRPTAAVLIESPSNPM | |
| | | | | | | LDVLDIARVAELTHKAGGLL | |
| | | | | | | IVDNVFATPLGQSPLRLGAD | |
| | | | | | | VIVYSCTKHIDGQGRVLGGA | |
| | | | | | | VLGSSKWINETLQPFTRNTG | |
| | | | | | | NALSPFNAWVLLKGLETLQL | |
| | | | | | | RTDAMARNAAAVADALAELP | |
| | | | | | | GIVQVRYPGRADHPQHELAK | |
| | | | | | | AQMSNGGSMVAFVVDKDREG | |
| | | | | | | AFAFMNAFKVIAISNNLGDA | |
| | | | | | | RSLATHPATTTHMRVSEEER | |
| | | | | | | ARLGITDGAIRLSVGLEDPA | |
| | | | | | | DLIDDLKRGAAAVAALA | |
| GO_ | GO_ | Large exoproteins | H | | Up | MAVPDFPRPPRRRFRPFCPG | 76 |
| 1389 | 1389 | involved in heme | | | | PHFPRHLHIARWAALACVTP | |
| | | utilization | | | | IALFAAAGSVFLWELAHGPV | |
| | | oradhesion | | | | DITRVSHLVEPVSIAAGKRP | |
| | | | | | | GHPAGRLSWDTLRIQWQPAA | |
| | | | | | | GGVPAGLVLMARGLKVTRFD | |
| | | | | | | NLIAERADEADAVLSLSALF | |
| | | | | | | EGVIAPRTLRLENATLALRR | |
| | | | | | | LPDGDVDMDLPNQKRGGRGV | |
| | | | | | | PTRLDRLRAIDVHNVSITLA | |
| | | | | | | GLPQDRTAVIGPVEMQARRI | |
| | | | | | | RVAPHSPDFVWTGTARTMVM | |
| | | | | | | LDGLRTTLTAQARQVGNTGR | |
| | | | | | | LHLDSTPFEPAELGVFSPLA | |
| | | | | | | ADWHVPVSVGADAVFVPHGM | |
| | | | | | | DEQPSELTLNLTLGDGQVFQ | |
| | | | | | | KTAEPIHLHAGQASVHLRMD | |
| | | | | | | RPGLDGGATVSVPSAGLDVA | |
| | | | | | | DNAGALTHVHASASLRLDSL | |
| | | | | | | RQPRVMDGDAEAGLDGVRFA | |
| | | | | | | TLGSIWPASIIKGGRRWISR | |
| | | | | | | NITDGTGRDLEVRAHLHGDH | |
| | | | | | | GPDSILPVSVQGQLTGRGLT | |
| | | | | | | VNWLRPVPPATGLDASLHFD | |
| | | | | | | GPETLVIDLSRGVQPTGVKE | |
| | | | | | | NVLLPDGEIRIGDLYAKDQT | |
| | | | | | | GDISTHLTGPLAGFMSALAH | |
| | | | | | | PRLHLLARHPLPFTHPEGMV | |
| | | | | | | DAHVRLTLPLVAHIPDGALH | |
| | | | | | | VWTQAMFSGVHLGNVLMGQP | |
| | | | | | | VDGASGKMSATEDGLDLTGD | |
| | | | | | | GRLAGIPTHVVLHENFQGGA | |
| | | | | | | PSRVLQTIEARSVLDPQSTA | |
| | | | | | | KARIAPGGLFDGHAVLNAHF | |
| | | | | | | VQQANEMSDLKLSLDMAQAA | |
| | | | | | | LTVPIWAKPMGEPATAMVHI | |
| | | | | | | GFQKGRMSVLDGLQAHGTGL | |
| | | | | | | SVAGRGVTRAGKLTGIVLEG | |
| | | | | | | FRIGRTEGDARIALPQAVDQ | |
| | | | | | | PIGVTVDADPLDLAPMFAPH | |
| | | | | | | PPTAAAPVSQGSSGAKGASM | |
| | | | | | | GDNWSISLNAPHVYYGPKAQ | |
| | | | | | | VGGVVSQIELRNGHLTSGRF | |
| | | | | | | ALDAPTRVRAVLADTGREHP | |
| | | | | | | FVLDIDNLGTLLEGLGLYDR | |
| | | | | | | IRGGQTHLDGVFTPDETTVR | |
| | | | | | | KVPEGRNTKSAGLWGGLPPF | |
| | | | | | | RGHVEMGPSQFLRPPLTLTA | |
| | | | | | | VSDLSPLHWLTNHLDRFEIS | |
| | | | | | | HLATRLSLAGNLLVLHDGVI | |
| | | | | | | GNQALGATMEGPIDLTTSTL | |
| | | | | | | NLNGTIVPLFGLNALPGRLP | |
| | | | | | | VLGHLLSPEKGGGLLAATFD | |
| | | | | | | LHGTVEKPDLSVNPLSMLLP | |
| | | | | | | GVMRRILH | |
| GO_ | GO_ | 5-aminolevulinate | H | | Up | MNYDAMFQSALDGLHADGSY | 77 |
| 1418 | 1418 | synthase (EC | | | | RYFADLERRAGNFPKAFHHG | |
| | | 2.3.1.37) | | | | LGRDVTVWCSNDYLGMGQHP | |
| | | | | | | EVLTAMHKALDETGAGAGGT | |
| | | | | | | RNISGTNHYHVELEKELASL | |
| | | | | | | HGKESALLFNSGYLSNWVTL | |
| | | | | | | GTIAGRLRNCVVLSDELNHA | |
| | | | | | | SMIEGIRHSRAEKQIFRHND | |
| | | | | | | IEDLERRLKELPADVPKIIA | |
| | | | | | | FESVYSMDGDIAPIEAFCDL | |
| | | | | | | ADKYGAMTYLDEVHAVGMYG | |
| | | | | | | DHGAGVAEKLGLSHRLTVIE | |
| | | | | | | GTLGKGYGVVGGYIAASAAL | |
| | | | | | | CDFVRSFGSGFIFSTALPPM | |
| | | | | | | IAAGALASVRYLRSSSAERE | |
| | | | | | | GQQRAVAYLRQALDKAGIPH | |
| | | | | | | VMNPSHIVPVMVGEAELCRS | |
| | | | | | | LSDELLNRFGNYIQPINFPT | |
| | | | | | | VPRGTERLRITPTPLHTNEM | |
| | | | | | | IDELVEALATLWQERQLKTS | |
| | | | | | | KSAAA | |
| GO_ | GO_ | hypothetical | H | | Up | MRFSPSVLTRIGRWAAVVLP | 78 |
| 1436 | 1436 | protein | | | | LALTHVRVAGEADLDLLAVL | |
| | | | | | | LLLHSGLTGRRQGGWDWFRE | |
| | | | | | | PWVVATFCWWGWQMLCTLWV | |
| | | | | | | SPGHGALVQSLLAIRFPLAA | |
| | | | | | | AALGCWLLKDALWRRRVLWL | |
| | | | | | | ACACGVYIAFQMLIQAVFGR | |
| | | | | | | NLFGIPRFHDGTLTGPYEHP | |
| | | | | | | RAAAPLSRLILPLLMVGCAA | |
| | | | | | | VEGARSRLVRTLGLCTATVV | |
| | | | | | | AVGIMVLAGQRMPLALSLLG | |
| | | | | | | IGVCALLYRPMRPAALAAAA | |
| | | | | | | MLPVLVLVARVFSPGSFFHL | |
| | | | | | | VTLARQQLTHFGQSPYGEIY | |
| | | | | | | THAIVMAQAHPWIGQGYDAY | |
| | | | | | | RHFCSDPSTFHGISGLSEAV | |
| | | | | | | PERGWLDLCVQHPHNHYLQA | |
| | | | | | | LVNAGVPGLILFVLMIATWL | |
| | | | | | | KAIWPGRNGAAISIGLFAAV | |
| | | | | | | FIQEWPIASSSDFLNLPLSG | |
| | | | | | | WGFLLLGLALAYRTFRGVDG | |
| | | | | | | FQAGRDRPIS | |
| GO_ | GO_ | GDP-mannose 4,6- | H | | Up | MPTALITGITGQDGAYLSQL | 79 |
| 1441 | 1441 | dehydratase (EC | | | | LLGKGYRVVGLLRRSASADV | |
| | | 4.2.1.47) | | | | IGERLRWLGILDDVELLDGN | |
| | | | | | | MTDLSSLIRIVETVKPDEIY | |
| | | | | | | NLAAQSFVAASWQQPLLTGN | |
| | | | | | | VTGMGAVNMLEAARIVKSDA | |
| | | | | | | RFYQASSSEMYGLIQEPVQN | |
| | | | | | | EKTPFYPRSPYAAAKLYAHW | |
| | | | | | | MTVNYRESFGMHASSGILFN | |
| | | | | | | HESPLRGIEFVTRKVTDGVA | |
| | | | | | | RIKLGLAKELALGNLDATRD | |
| | | | | | | WGHARDYVRAMYLMLQQEVP | |
| | | | | | | DDYVIATGRTTSIRDLCRIA | |
| | | | | | | FSSVGLNYEDHVVTNPAFLR | |
| | | | | | | PAEVEVLLGDASKAKKTLAW | |
| | | | | | | EPETTLEEMITEMVEADLAR | |
| | | | | | | HSKRNGL | |
| GO_ | GO_ | GDP-mannose 4,6- | H | | Up | MRLLITGLRGFVGQHLQHQV | 80 |
| 1442 | 1442 | dehydratase (EC | | | | RKRFPGSEIMAGIPDIRDAQ | |
| | | 4.2.1.47) | | | | AVEKVIAAEKPDHCVHLAAV | |
| | | | | | | STIGAARKSPDHAWDVNLRG | |
| | | | | | | TLNVARAMLRHVPHSTFLFA | |
| | | | | | | STAEAYGTTFQLGTALTEDA | |
| | | | | | | PLAPGNTYAATKAAADLALS | |
| | | | | | | AMAREGLRVVRMRPFNHTGP | |
| | | | | | | GQSPDFVVPAFASQIARIAK | |
| | | | | | | GLQKPEISVGNLDAQRDFLD | |
| | | | | | | VRDVCDAYLDVLTAKKPLTP | |
| | | | | | | GTILNVCSGETRSIRSILDD | |
| | | | | | | LLAISGINAEIVTDPDRLRP | |
| | | | | | | SDIPVARGDATLITSTLGWR | |
| | | | | | | RQIAWEDTLRNVYEDCMRKT | |
| | | | | | | TA | |
| GO_ | GO_ | Lipopolysaccharide | H | | Up | MTKEYTIWIDVEDIFRYFEN | 81 |
| 1446 | 1446 | N-acetylglucosaminyl | | | | NTRPSGIQRLVFEILSVIRH | |
| | | transferase I | | | | QAAAKPDIGRIVLTRRNTGA | |
| | | | | | | RAETGPLLSPVSFDALNTLF | |
| | | | | | | STHTEETTPTQAGERSAAHA | |
| | | | | | | PSHSLMRRLRHAVIRRIESL | |
| | | | | | | PPELARPLLNLAVNQLRALQ | |
| | | | | | | LLRRYARAKFQRATPSRNTV | |
| | | | | | | QAPLSPTAPAATSVDVPKPG | |
| | | | | | | DIFLILGAAWSEPDFGERLG | |
| | | | | | | RMRRAYGIQPVLLLYDLIPA | |
| | | | | | | VRPEWCAISLIRDFRHWLDT | |
| | | | | | | TLPQCGRLLAISHATAETVE | |
| | | | | | | DYARKQRLKLLAPVQTIPIG | |
| | | | | | | SGFGPPHKVGNERPKGLPTK | |
| | | | | | | GSYVLFVSTLEARKNHLLAF | |
| | | | | | | RIWRRLVTELPRDQVPTLVF | |
| | | | | | | AGRVGWLVSDLMQQLENTEW | |
| | | | | | | LRGKIRLLRDPSDEELAHLY | |
| | | | | | | DGCMFTIFPSLYEGWGLPVT | |
| | | | | | | ESLVNGRPCIASNTTSIPEA | |
| | | | | | | GGPLTRYFNPEDLDDAYRVV | |
| | | | | | | RETIEDRAGLKKWQDEVREQ | |
| | | | | | | FQPVPWERSADAILDACHSA | |
| | | | | | | HLTGRMNGQTS | |
| GO_ | GO_ | glycosyl transferase, | H | | Up | MTLWIDIDDLLHHLLHHSRP | 82 |
| 1447 | 1447 | group 1 | | | | SGIQRVVFEIGSALRNLAGH | |
| | | | | | | NVQFVRRGPGATDARDFRTV | |
| | | | | | | DWTMVETVFREATNSSIKPG | |
| | | | | | | SSSVNAPPLTVQALEEVAPE | |
| | | | | | | DTLSAFLRTESRILKGLAGL | |
| | | | | | | PRTFARLGLKALQTRLEARR | |
| | | | | | | ARPELPTFSEGTQLADVARP | |
| | | | | | | GDVFLTLGSPWHHASYSQTV | |
| | | | | | | RWLRDDLRLSYALLMYDLVP | |
| | | | | | | IRCPEWCNRGIITTFRAWHQ | |
| | | | | | | DILPLADTLFAISHATAKDV | |
| | | | | | | RAYLAEQDIGTDIPVHPIPL | |
| | | | | | | GTGFGLSDGGMSAEALVREP | |
| | | | | | | YVLFVSTIEARKNHALLFRV | |
| | | | | | | WRRMLEEMPAERVPTLVFAG | |
| | | | | | | REGWLVSDFMQQLENADWLK | |
| | | | | | | GKIRFIRNPTDEDLRRLYAD | |
| | | | | | | CSFTVFPSFFEGWGLPVTES | |
| | | | | | | LSMGRPCVVSNTTSIPEAGG | |
| | | | | | | PLGRYFSPYSLDEAYTVIRK | |
| | | | | | | TIEDPEGLAAWTAKVRAEFR | |
| | | | | | | PVPWEDSARAILDRVL | |
| GO_ | GO_ | Radical SAM | H | | Up | MTTAPPPGPLSLYIHWPFCL | 83 |
| 1460 | 1460 | family | | | | AKCPYCDFNSHVREVIPQQR | |
| | | enzyme, | | | | FAAALRRELEHDAARLTRDG | |
| | | similar | | | | VKRPLRSIFFGGGTPSLMAP | |
| | | tocoproporphyrinogen | | | | ETVAALIEDAHRLFDAEDDL | |
| | | III oxidase, | | | | EITLEANPTSVEAGKFAAFR | |
| | | oxygen- | | | | QAGVNRVSLGVQSLRDDALH | |
| | | independent, | | | | KLGREHSATQAIRALETART | |
| | | clustered | | | | LFPRISFDLIYARPGQSDAD | |
| | | with nucleoside- | | | | WTDELTTALDLVADHLSLYQ | |
| | | triphosphatase RdgB | | | | LTIEPGTKFEAMHRRGELTL | |
| | | | | | | PDEDTAARLYDLTGEIAARH | |
| | | | | | | GLLPYEVSNYARPGAESRHN | |
| | | | | | | LTYWRYADYIGIGPGAHGRL | |
| | | | | | | TLDGELYATRRHRAPEPWAE | |
| | | | | | | RVEKTGSGSTEETLLTPQEK | |
| | | | | | | GREALLMGLRLSEGIDEARF | |
| | | | | | | AARTDRTLMECVDPALLEAC | |
| | | | | | | IEENYLERANGILRATGEGR | |
| | | | | | | LRLEAILARLVT | |
| GO_ | GO_ | 7-carboxy-7- | H | | Up | MSYAVKEMFVTLQGEGAQTG | 84 |
| 1506 | 1506 | deazaguanine | | | | RASVFCRFAGCNLWSGREQD | |
| | | synthase (EC | | | | RATAACTFCDTDFIGTDGEG | |
| | | 4.3.99.3) | | | | GGRFETAEALASTIEACWTD | |
| | | | | | | TADDSGRRYVVFTGGEPLLQ | |
| | | | | | | LDDALIAAVKAHGFEIAVET | |
| | | | | | | NGTIVAPAGIDWVCVSPKPG | |
| | | | | | | GALVQTEGAELKLVYPQPEL | |
| | | | | | | SPELFEQLSFRHFWLQPMDG | |
| | | | | | | PDRIANTQAAVAYCLHHPRW | |
| | | | | | | RLSLQTHKLIGIP | |
| GO_ | GO_ | Outer membrane | H | | Up | MAFLVSGQALAAPATSFTPA | 85 |
| 1516 | 1516 | protein | | | | QRAEIVGIMRDALQNDPSIL | |
| | | | | | | TDAIRAIREKAEEQKQDSTL | |
| | | | | | | AAVKAHQSELQSAPDFAIRG | |
| | | | | | | NPHGRITVVEFYDPRCSYCR | |
| | | | | | | SMMGEVDSFLSRHPDVRLVE | |
| | | | | | | KVVPVLGNNSVLDTRAIFAA | |
| | | | | | | SAQGKYEAMRRALMADTTKP | |
| | | | | | | SMERIVELAQANGIDTKKLT | |
| | | | | | | ADMSSPQTVALINTNLDQGR | |
| | | | | | | AVGLDGTPTFIFGTAAVAPG | |
| | | | | | | ALEADQMDAFLERARKA | |
| GO_ | GO_ | ATP-dependent Clp | H | | Up | MKMHAGSGNDMDITRMTPTR | 86 |
| 1530 | 1530 | protease | | | | LDDEPDAPEPETREDDNKTL | |
| | | proteolytic | | | | NSPISELEGRLFDQRKVLIF | |
| | | subunit(EC | | | | GGINDKIARDVTGRLLALAG | |
| | | 3.4.21.92) | | | | TSDKPIDVYVNSPGGHVESG | |
| | | | | | | DTIHDMIRFVDSIAPINMIG | |
| | | | | | | TGWVASAGALIYAAGRPERR | |
| | | | | | | VCLPNTRFLLHQPMGGVRGP | |
| | | | | | | ATDIDIEAREIIKMRERLNR | |
| | | | | | | IFAKETGQTYEKVAKDTDRN | |
| | | | | | | YWMSANEAIAYGLVNRIVHS | |
| | | | | | | ATELK | |
| GO_ | GO_ | Phosphoribosyl-ATP | H | | Up | MGKPATKPAPKPSKQQDDKK | 87 |
| 156 | 156 | pyrophosphatase (EC | | | | SDLQQELVLQRLYDTVQSRR | |
| | | 3.6.1.31) | | | | GTDPSLSHSARLMARGRNKI | |
| | | | | | | AQKFGEEAVECLIEAVNGNR | |
| | | | | | | KELIGESADVLYHLIVMWVD | |
| | | | | | | AGVSPEDVWTELKRREGTSG | |
| | | | | | | IAEKAARPKEKLG | |
| GO_ | GO_ | N-acetyltransferase | H | | Up | MTITCERVVSPLPPEDLDAL | 88 |
| 158 | 158 | /Phosphoribosyl | | | | IEATSAGILDGGGFGWLQPP | |
| | | formimino-5- | | | | GHQALARYFEGLLLVPERSF | |
| | | aminoimidazole | | | | YVVRENGVICGAGQLVRPPA | |
| | | carboxamideribotide | | | | SYEAHAATANLTGFFVAPYA | |
| | | isomerase (EC | | | | RGRGLGRALLEAMLKGAKAI | |
| | | 5.3.1.16) | | | | GCKVVNCDIRETHVAAIGLF | |
| | | | | | | RSFEFEHWGTHPYYARIGGQ | |
| | | | | | | TVRGLFLSKLLANENEAARW | |
| | | | | | | QSSIAMPDTSSAASDTMTDT | |
| | | | | | | PTPAHDLTLYPAIDLKDGAC | |
| | | | | | | VRLRRGEMEDATHYSDDPGA | |
| | | | | | | QAKLFAEAGCRHLHVVDLNG | |
| | | | | | | AFAGRSTNIPAIESIVKATN | |
| | | | | | | LPVQLGGGIRDMAAIERWLE | |
| | | | | | | AGVSRVILGSVAVKDPELVR | |
| | | | | | | QAARAFPGRIVAGIDARQGR | |
| | | | | | | VATEGWAEVSELEANDLALR | |
| | | | | | | MEDAGVAAVIFTEITRDGML | |
| | | | | | | AGLDLEQTADMARRLSIPVI | |
| | | | | | | ASGGVGSLEHLKALRDVARD | |
| | | | | | | VPGISGAIVGRALYDGRIAL | |
| | | | | | | KDALDVLGSC | |
| GO_ | GO_ | Citrate | H | | Up | MSENRSVTFGLDGLSRQFPL | 89 |
| 1600 | 1600 | synthase (si) | | | | LEGTIGPDVVDMRALSQKTG | |
| | | (EC 2.3.3.1) | | | | VFSFDPGLGSTATCTSAISY | |
| | | | | | | IDGDKGVLLHRGYPIEDLAL | |
| | | | | | | NASFTETAYLLLYGELPTAA | |
| | | | | | | QYQAFRTDMNTHRLLNEQIR | |
| | | | | | | NFFNGFRRDAHPMAILCGTV | |
| | | | | | | GALSAFYHDGLDISEPKARD | |
| | | | | | | LSARRLIAKVPTIAAWAYKY | |
| | | | | | | SIGEPFIYPDEEMSFSENFL | |
| | | | | | | HMLFARPGNHYRVNPVLARA | |
| | | | | | | MDRILLLHADHEQNASTTTV | |
| | | | | | | RLVGSTGANPYACIAAGIAA | |
| | | | | | | LWGPAHGGANEAALGMLETI | |
| | | | | | | GTREGIPAFLNEVKNRDSGV | |
| | | | | | | RLMGFGHRVYKNFDPRAKIL | |
| | | | | | | QATCHEVIEELGLKRDPLLD | |
| | | | | | | LAMELERVATEDDYFVSRRL | |
| | | | | | | YPNVDFYSGLILKALGIPKS | |
| | | | | | | MFTVLFAVARTVGWVSQWKE | |
| | | | | | | MIEEPSVRISRPRQLYIGAA | |
| | | | | | | ERSFVPMSERR | |
| GO_ | GO_ | Putative phosphatase | H | | p | MTRIREHGIRVVGDVHGDFN | 90 |
| 1603 | 1603 | | | | | AFRHATATDRFVIQLGDLVD | |
| | | | | | | HGPDSAGVMELMLELLEQQR | |
| | | | | | | GLFILGNHDRKLGRALEGRR | |
| | | | | | | LRRDPPLEETLRQISLPEYE | |
| | | | | | | GLPERAYRAIDQAPTWLRIG | |
| | | | | | | RSLFVHGGFHTAMLSHSPVP | |
| | | | | | | GLGEMSAPLSRALFGETTGR | |
| | | | | | | MQPDGYPERRLTWINRIPEG | |
| | | | | | | MTVYVGHDRRSTDGRPWRRT | |
| | | | | | | GRLGGTAVFTDLGAGKGGHL | |
| | | | | | | AWIDLNEP | |
| GO_ | GO_ | Acyl-CoA: | H | | Up | MSHRDAKTPNGRRGHNRPVL | 91 |
| 1612 | 1612 | 1-acyl-sn- | | | | EGKPDFPASRPTTSTTLYSR | |
| | | glycerol-3- | | | | LRCAGRLSLVLIWAFWACSM | |
| | | phosphate | | | | QAILVRLPGRLKIMMPRIFW | |
| | | acyltransferase | | | | KGVCRILGIRIRVIGHSAGG | |
| | | (EC 2.3.1.51) | | | | VRTARDVREGKRPVVFVANH | |
| | | | | | | CSWLDIAIIGSTLPVVFVAK | |
| | | | | | | GEVGKWPLIGTASRLGRTIF | |
| | | | | | | VSRNRRETGRELHDMAARLW | |
| | | | | | | DGDDIVLFPEGTSSDGSRVL | |
| | | | | | | PFLSSFFAVAKPGRLEQVGM | |
| | | | | | | PKAPPVLIQPVSVVYDSLEG | |
| | | | | | | LPVGRSRRNVFSWYGDMDLA | |
| | | | | | | PHLWSFGQWRSMGASLMLHD | |
| | | | | | | PITPDDFRSRKDLSRATFEA | |
| | | | | | | VNNGAAELRRGQPKVTGP | |
| GO_ | GO_ | Response regulator | H | | Up | MAPSLTVLLIEDDFLIRTCL | 92 |
| 1616 | 1616 | receiver | | | | AEFLLDSGLTVREADNCAEA | |
| | | | | | | RAIIGAEPKLDALVADMTLP | |
| | | | | | | DGDGMTLVQPARERWPDLPV | |
| | | | | | | IYISGHGDLRRDETSGDPAR | |
| | | | | | | DRFISKPYTLASILEALLDM | |
| | | | | | | TSAASD | |
| GO_ | GO_ | hypothetical | H | | Up | MKRLHFSNMDQAVVFFASRT | 93 |
| 1618 | 1618 | protein | | | | GSLALATQETLSVMCFQSRF | |
| | | | | | | QTCIHKER | |
| GO_ | GO_ | FIG00688344: | H | | Up | MTLPVLVLAGSRDGENDVLA | 94 |
| 1653 | 1653 | hypothetical | | | | KLGQVSHKALLPVAGQPMLA | |
| | | protein | | | | RVLDTIARTPGLGPVTISIE | |
| | | | | | | NPDCIRDLAGDATILRSAPS | |
| | | | | | | PSESVAEAIARIGTPCLVTT | |
| | | | | | | ADHALLRPEWIQEFLAKAQG | |
| | | | | | | CDLAAAVALRATVERDVPGT | |
| | | | | | | KRTYIHLSDMSFSGCNLFLI | |
| | | | | | | GTPKGRNVIELWKRLQQNRK | |
| | | | | | | RPLRMALTLGIGTLLRAVTR | |
| | | | | | | TLDPTALYRRIRTLTGANVR | |
| | | | | | | LVTLSDGRAAVDVDKPSDLT | |
| | | | | | | LAEKILAQTTP | |
| GO_ | GO_ | Sphingolipid (S)- | H | | Up | MSNFKAPWRNMSAIRTGRSF | 95 |
| 1654 | 1654 | alpha-hydroxylase | | | | DLGKMNLQQLWFAYLTYPTI | |
| | | (no EC) | | | | LLYFALIAVSTWAALHFSTA | |
| | | | | | | LWATLIPVPVVIVVYPLAWY | |
| | | | | | | AIHRFILHGRWLYRNHWTAS | |
| | | | | | | LWKRIHFDHHQDPHLLDVLF | |
| | | | | | | GSPLNTVPTMAIITMPIGGL | |
| | | | | | | IAGWSGAFCALSTALVMTCI | |
| | | | | | | YEFFHCIQHLAYKPRWKWVA | |
| | | | | | | DIKQLHVLHHFHDEDGNYGI | |
| | | | | | | TNYVPDRLFSSFYREARDRP | |
| | | | | | | RSKHVFNLGYDIEEAHRYPW | |
| | | | | | | VMDLTGSPPRDRPDGARPAS | |
| | | | | | | ARAAADRNRAA | |
| GO_ | GO_ | Lipopolysaccharide | H | | Up | MKQRAHILDRYLLTQMAPPF | 96 |
| 1656 | 1656 | export system | | | | AIALLAMLVALLLERLLSLF | |
| | | permease | | | | DYLASAGSSLGTCIALLTDL | |
| | | proteinLptF | | | | LPHYFGIALPAALCIAVFLT | |
| | | | | | | IRSMSDNNEIDALQAGRVSL | |
| | | | | | | MRISRPFMIVGLLLGAASVF | |
| | | | | | | LYGYIQPVARYDYRAGFYFA | |
| | | | | | | EHTGWAPHLQAGMFASTSSK | |
| | | | | | | AVMTADSVSHAGTRLRRVFI | |
| | | | | | | REVNANGVAHIITARTGALT | |
| | | | | | | ISEKTRSTRLDLWNGEIVDD | |
| | | | | | | PFQATKPHKPTVTHFEHVVR | |
| | | | | | | VIDRPNKETSFRSRGADERE | |
| | | | | | | LTLFELAHDLRYGLPGIEYR | |
| | | | | | | TLRAEMDFRMARAIAIPFIP | |
| | | | | | | PLAVALAISARRRKSVWGLI | |
| | | | | | | AVAVILIGFDQTLMFGHSLA | |
| | | | | | | STGRLPIWLAIWVPEVVFCV | |
| | | | | | | GCLAALLRRSRGSWRRRKFT | |
| | | | | | | RAPA | |
| GO_ | | Serine | H | | Up | MTDIFAKHHGLREAYEGLTA | 97 |
| 1660GO_ | | palmitoyltransferase | | | | ASPRNPFEVVIERPISASVG | |
| 1660 | | (EC 2.3.1.50) | | | | IIEGRETLLFGTNNYLGLSQ | |
| | | | | | | SKKAIGAAVETAETMGVGTT | |
| | | | | | | GSRIANGTFGLHRKLEAKLA | |
| | | | | | | EFFRRKHCMVFSTGYQANLG | |
| | | | | | | TISALVNKDDVLLLDADSHA | |
| | | | | | | SIYDGAKLSGAQVIRFRHND | |
| | | | | | | PVDLEKRLARLKDHPGAKLI | |
| | | | | | | VAEGIYSMTGNVAPLDKFVD | |
| | | | | | | IKTRHGAYLMADEAHSFGVL | |
| | | | | | | GAHGRGVAEMQGCEDGIDFV | |
| | | | | | | VGTFSKSLGTVGGYCVTNHD | |
| | | | | | | GVDLMRLCSRPYMFTASLPP | |
| | | | | | | EIIAATMAALEDMQARPELR | |
| | | | | | | TKLQENAARLHAGLQKVGLK | |
| | | | | | | TGEHVSPVVAVTLETVDQAV | |
| | | | | | | GFWNALLENGVYVNLSLPPA | |
| | | | | | | TPDNRPLLRCSVMAAHSPEE | |
| | | | | | | IDRAVAVFGEVARHFGL | |
| GO_ | GO_ | Homoserine O- | H | | Up | MDISASPSIADGPVYTHQTV | 98 |
| 1749 | 1749 | acetyltransferase | | | | RLDSGLDLECGVHLAPLEVA | |
| | | (EC | | | | YCTYGTLSPARDNAILVCHA | |
| | | 2.3.1.31) | | | | LTGDQYLAERNPLTGKPGWW | |
| | | | | | | SRMVGPGLPIDTDRYFVVCS | |
| | | | | | | NVLGGCMGTTGPRSICAETG | |
| | | | | | | KAWDSEFPPITMHDIVAAQA | |
| | | | | | | KLIDHLGVDRLFAVIGGSMG | |
| | | | | | | GMQALTWAADFPDRVFAAMP | |
| | | | | | | IATSPFHSAQNIAFNEVSRQ | |
| | | | | | | AIFADPDWHDGHYRDFGAIP | |
| | | | | | | ARGLGVARMMAHITYLSEEA | |
| | | | | | | LSRKFGRRVRHDAATAVPAS | |
| | | | | | | SSPSLFGEMFEVESYLRHQG | |
| | | | | | | SSFVRRFDANSYLTITRAMD | |
| | | | | | | YFDLAAEHDGDLANPFRKSQ | |
| | | | | | | TRFCVVSFSSDWLFPTSQSR | |
| | | | | | | LLVRALNRAGANVSFVEIES | |
| | | | | | | DRGHDAFLLEEPDFDRTIRG | |
| | | | | | | FIAGAAEHAALKVGER | |
| GO_ | GO_ | UDP-N- | H | | Up | MSGFPSHLLAGERYAVCGLG | 99 |
| 1794 | 1794 | acetylmuramoyl | | | | RNGTAVVQALLRMGAEVQAW | |
| | | alanine--D- | | | | DDRNANLPAQPNLTVAPLTD | |
| | | glutamate | | | | LSGMTALILSPGIPHLLPKA | |
| | | ligase(EC 6.3.2.9) | | | | HPVADLARAQNVQILSDAEI | |
| | | | | | | LYRAARKSGSKAAFVAVTGT | |
| | | | | | | NGKSTTTALIAHLFTTAGRP | |
| | | | | | | CAAGGNLGTASLALPLLPDD | |
| | | | | | | GVYVIEMSSYMLERLDRFHA | |
| | | | | | | NAACLLNLTPDHLDRHGDMA | |
| | | | | | | GYAAAKAHIFDNMGPDDLAV | |
| | | | | | | IGTDDDWCRSIASQVASRGV | |
| | | | | | | QVAELDADTLPPYDGPALPG | |
| | | | | | | RHNAQNVGAALAIARHLGLD | |
| | | | | | | DAVIRTGLRSFPGLEHRLQK | |
| | | | | | | VAECDGVSFINDSKATNAEA | |
| | | | | | | VSKALAAYDNVMWIAGGVAK | |
| | | | | | | AGGIESLAPFFAHIAQAFLI | |
| | | | | | | GQDADVLAATLETHGVPFQQ | |
| | | | | | | CGTLEKAVPAAFEAARNENI | |
| | | | | | | PVVLLSPACASFDQFRSFED | |
| | | | | | | RGSHFLQICDNIVKSGHSGT | |
| | | | | | | NPMQKQED | |
| GO_ | GO_ | FIG00688361: | H | | Up | MDAESKSEGAATGGIAADRL | 100 |
| 1806 | 1806 | hypothetical | | | | RSIIERVERLEEERKALAGD | |
| | | protein | | | | IKDIFSEAKSAGFDVKVIKQ | |
| | | | | | | IIRLRKQEPAEIEEQETLLD | |
| | | | | | | IYRRALGM | |
| GO_ | GO_ | Transcriptional | H | | Up | MGKKDEDRRIGERGENQMDW | 101 |
| 1836 | 1836 | regulator, LysR | | | | DKLRIFHAVAEAGSFTHAGD | |
| | | family | | | | RLGLSQSAVSRQISALEDVL | |
| | | | | | | RVPLFHRHARGLILTEQGDV | |
| | | | | | | LNRTVREVFSKLALTQAFLS | |
| | | | | | | ESKERAAGKIKITTTTGFGL | |
| | | | | | | SWLSPRLNRFLELHPDIEVT | |
| | | | | | | LLLEDADLDLGMREADVAIR | |
| | | | | | | LHPPTQPDLVQRHLANFPMP | |
| | | | | | | IYASAEYLERNGTPHSLEDL | |
| | | | | | | ANHQIISFAGWHLPLPNVNW | |
| | | | | | | LLDLLRQEGVARQGSRRLAI | |
| | | | | | | NNISAVANAIAAGTGIGSLP | |
| | | | | | | LYAATGYPELVRILPNQQVP | |
| | | | | | | LVEAYFVYPEELRTSKRIAV | |
| | | | | | | FRDFLLSEISNLKGHE | |
| GO_ | GO_ | Integration | H | | Up | MSTVTRANLVEHLYSRVGLS | 102 |
| 1854 | 1854 | host | | | | RHDSSMILESLLGVISDRLE | |
| | | factor alpha | | | | AGESVKLSGFGTFSVRQKGE | |
| | | subunit | | | | RIGRNPKTGVEVPILPRAVL | |
| | | | | | | VFRPSQLLRDRMNGSENGAA | |
| | | | | | | DEASSHDR | |
| GO_ | GO_ | Uncharacterized | H | | Up | MTDFSPPPSPDTITVEASAS | 103 |
| 1856 | 1856 | UPF0118 membrane | | | | TGTIQRRARGFLALFFVAIG | |
| | | protein | | | | LYTLKGFLPALLWGCVFAIS | |
| | | | | | | IWPLYRRAELRFGRSDWLPM | |
| | | | | | | VFTLAVALIFLVPVSLVGVK | |
| | | | | | | VADEARSALEWIDDVRNNGI | |
| | | | | | | PMPEWVPHLPFLSAQATNWW | |
| | | | | | | QNHMTSPQRLSHLLHSVDVG | |
| | | | | | | HGMQMTKQVGSQLARRGTLF | |
| | | | | | | AFSLLTLFFLLKDGDSVIRK | |
| | | | | | | CLLGSQRLFGEQGESLAKQM | |
| | | | | | | ISSVHGTLAGLVLVGLGEGA | |
| | | | | | | IMGIVYMATGAPQPLLFAMV | |
| | | | | | | TAVAAMIPFLAWPTVGLVAL | |
| | | | | | | LLLAKSSMIGAIVVLAIGSV | |
| | | | | | | VIFIADHFIRPALIGGSTKM | |
| | | | | | | PFLWVLLGILGGAETWGLLG | |
| | | | | | | LFLGPAIMAALHLLWTLWTE | |
| | | | | | | VNPRKGVYAEDKGS | |
| GO_ | GO_ | Putative outer | H | | Up | MRSRLTFSIGATAVLALSST | 104 |
| 1909 | 1909 | membrane protein | | | | AMATPLQDPYGTWTVQGEND | |
| | | | | | | AISTLKGTSDQYYTSGLRIN | |
| | | | | | | WTSGTDNLPRPIAKLNHILM | |
| | | | | | | GDGVQRISIGLQQIIDTPRD | |
| | | | | | | TQADNPPQGDRPYAGLLLGT | |
| | | | | | | VNLINDTDLSRTVMGIQFGM | |
| | | | | | | LGPSGLGRQVQNGFHKAISD | |
| | | | | | | TPSTGWSHQLANQPIFQVQA | |
| | | | | | | GRIWRVPVLNVYGIHADVLP | |
| | | | | | | AISGAAGDYRTYADVATTFR | |
| | | | | | | IGQGLDSDFGNATIGPGLDG | |
| | | | | | | TDAFRATRPFAWYFYGGVEG | |
| | | | | | | QAVGYDVTLQGSTVRPNAPH | |
| | | | | | | VEKVWDVGEIHAGVAVMWHG | |
| | | | | | | VRLSYSQNWQTAQFETQKAG | |
| | | | | | | LFNYGSLKLSVKF | |
| GO_ | GO_ | UTP--glucose-1- | H | | Up | MIKPLKKAVLPVAGLGTRFL | 105 |
| 1922 | 1922 | phosphate | | | | PATKAMPKEMLPVVDKPLIQ | |
| | | uridylyl | | | | YAIDEAREAGIEEFCLVTGR | |
| | | transferase | | | | GKDSLIDYFDIAYELEATLK | |
| | | (EC 2.7.7.9) | | | | ERGKKSALEALAPSSVQAGS | |
| | | | | | | LVAVRQQEPLGLGHAIWCAR | |
| | | | | | | SFIGDDPFAILLPDDIVKGR | |
| | | | | | | SCIGQLVEAYNQTGGNVVAV | |
| | | | | | | TEVPPEHTNRYGILDVGSDD | |
| | | | | | | GKLVEVKGLVEKPAPEDAPS | |
| | | | | | | NLSIIGRYVLTPDVMKYLAK | |
| | | | | | | LERGAGNEVQLTDAMAKTIG | |
| | | | | | | EVPFHGLRYEGTRYDCGDKA | |
| | | | | | | GFLEAQIAFSIDREDLGASV | |
| | | | | | | KAFLKKYKQYVDAP | |
| GO_ | GO_ | UTP--glucose-1- | H | | Up | MPFRHDFDPTSLREYDIRGI | 106 |
| 1923 | 1923 | phosphate | | | | VGKTLHPADAFAIGRTFASM | |
| | | uridylyltransferase | | | | VIRAGGKRIVVGYDGRLSSP | |
| | | (EC 2.7.7.9)/ | | | | ALAEALVRGAVESGAEVTRI | |
| | | Phosphomannomutase | | | | GCGPTPMLYFASVADGADGA | |
| | | (EC 5.4.2.8) | | | | VMVTGSHNPPDYNGFKMMMG | |
| | | | | | | GKPFYGDQIRELGRLSASGD | |
| | | | | | | VLPATNGTAARIDISGRYID | |
| | | | | | | RLVQDYDGIRPLRVVWDNGN | |
| | | | | | | SAAGAVLSRLVERLPGEHTV | |
| | | | | | | LFGEIDGHFPNHHPDPTVEK | |
| | | | | | | NLQDLIRVVDEKQADLGIAF | |
| | | | | | | DGDADRIGIVDNRGQIFWGD | |
| | | | | | | QMLVLLAQDVLSRHPGATII | |
| | | | | | | ADVKASQILFDEIAKAGGQP | |
| | | | | | | LMWKTGHSLIKTKMAETGSP | |
| | | | | | | LAGEMSGHIFFADKWYGFDD | |
| | | | | | | ALYAAVRVLGIVSRLPGPLS | |
| | | | | | | DFRDSLPVTVTTPELRFNCD | |
| | | | | | | DKRKFEVITEVAERLRKEGS | |
| | | | | | | DVSEIDGVRVNTADGWWLLR | |
| | | | | | | ASNTQAVLVARAEARDEAGL | |
| | | | | | | DRLKAALAAQLEASGLDAPD | |
| | | | | | | FSGENAGH | |
| GO_ | GO_ | hypothetical | H | | Up | MSPPSSNRPFSQPSDQPSVG | 107 |
| 1932 | 1932 | protein | | | | TVLRARREELGWRLEDVAEW | |
| | | | | | | LRIRPKLLAALEADDLSKLP | |
| | | | | | | GVAYAVGFLRTYAHAMQLDA | |
| | | | | | | DALVERFRRDTRGAVTRKPE | |
| | | | | | | LVFPQPEGDRGLPVGVLVGA | |
| | | | | | | GLVVVVAAYVGWYRFTEHDN | |
| | | | | | | PAQRQVPAVAELMPGAATPA | |
| | | | | | | MTSPQVASVMPGRAPTPEPH | |
| | | | | | | APVTASSVPATPAPVPTQNA | |
| | | | | | | PAPELPAAPAGAQSTPPSAA | |
| | | | | | | PSVAPPASDDDSETTPPAGE | |
| | | | | | | AAPTQQTDTQQTGAIGRPAT | |
| | | | | | | DLPPAVPEGAVVLRALAPVW | |
| | | | | | | TQVRDRDGHVLMSRVMQPGE | |
| | | | | | | SWQGDPAGAPFRMSFGNAGG | |
| | | | | | | IVLTTAGATSAPLGKEGQVR | |
| | | | | | | RNVEVTADAIRSGAFGSGVA | |
| | | | | | | LPVQPNAPVSVPGAASAPLA | |
| | | | | | | VAPAPVPPRAPSVSVPRKAP | |
| | | | | | | TAPEVSADDLNARQLEHQPL | |
| | | | | | | EQSSPPH | |
| GO_ | GO_ | hypothetical | H | | Up | MIAIGPAMASQPAWLKAATI | 108 |
| 1945 | 1945 | protein | | | | IVGTFILEDVATVLSAIAAR | |
| | | | | | | AGEVSIPLALGALYFGVAVG | |
| | | | | | | DMGLYGLGAAGARWPYLKRF | |
| | | | | | | LTLPKRERTQDWFSTNVIRV | |
| | | | | | | VAISRFVPGARLPLYTACGF | |
| | | | | | | FRAPFLPFAMTAVLATLVWT | |
| | | | | | | TCLFLLAMRVGGWLLAHQGG | |
| | | | | | | WRWAGLAGFVLCIVVVGRLI | |
| | | | | | | ARLQTVSQ | |
| GO_ | GO_ | Hypothetical | H | | Up | MTLPDRTDIPAPHDDLVVRP | 109 |
| 1984 | 1984 | protein | | | | VTTRADLKLFMTLPRRIYAG | |
| | | associated | | | | MAGFVPAFDMEQDDLLNPKK | |
| | | with | | | | APIFRHASIRYFLAWRGNTA | |
| | | Serinepalmitoyl | | | | VGRIAAIVDHRAIEHWGMKI | |
| | | transferase | | | | GCFGALDAVPEGSVVSALLE | |
| | | | | | | MARNWLRLQGMQTMRGPVTL | |
| | | | | | | SGNGESGLMVEGQDQPLMVA | |
| | | | | | | MPWHPRLLGKLVEDAGYKPV | |
| | | | | | | EDLLSYKLDLDDQTESRFKV | |
| | | | | | | PGDLKIGEGRLGAIAIRRLS | |
| | | | | | | KKQIAQQGEILRQLYNDAWS | |
| | | | | | | DKFNFVPLQDYEMKAMIKQL | |
| | | | | | | GPVLRPEHYVQIDQNGEPVA | |
| | | | | | | MALVVPNIYDIAGDLGGAPS | |
| | | | | | | PLGWVKLVARLTTHRFHSAR | |
| | | | | | | VILLGVTQRLRGTVLGALLP | |
| | | | | | | SLAIAELMRRRKSLPYSWVE | |
| | | | | | | LGWIQASDSNMRNLAESIVP | |
| | | | | | | EPYKRYRLYERPIDDPA | |
| GO_ | GO_ | Oxidoreductase, | H | | Up | MNTAQQLRVGIVGAGHFGRF | 110 |
| 1999 | 1999 | Gfo/Idh/MocA | | | | HALKSAANPAEQLVALYDPD | |
| | | family | | | | PARAAIVAREARCGIATSYE | |
| | | | | | | NLLEQVDAVIIAAPAEYHFR | |
| | | | | | | LTSQALRAGRHALVEKPIAA | |
| | | | | | | TLDEAHALADLARETGKVLQ | |
| | | | | | | VGHLLRYSAEHQAITERIKA | |
| | | | | | | PLYIEATRIAPYKPRGTDVS | |
| | | | | | | VILDLMIHDLDLVLAIVDSP | |
| | | | | | | IAEIDALGAAVSSAHEDIAN | |
| | | | | | | ARVRFENGCVATITASRISL | |
| | | | | | | KTERRMRLFSQDGYLSADFM | |
| | | | | | | ERKLSFIGRERGMPLPGTGG | |
| | | | | | | FRREAISWKDHDNLAVEHEA | |
| | | | | | | FAASCLHGTPVLVDAQAGIR | |
| | | | | | | ALDAAIRVTDSIRKSRQIME | |
| | | | | | | LSGLIPASDKN | |
| GO_ | GO_ | LSU ribosomal | H | | Up | MKSGIHPDYHEITVIMTDGT | 111 |
| 2004 | 2004 | protein | | | | EYKTHSCYGEPGATLRLDVD | |
| | | L31pprotein | | | | PKSHPAWTGVQRMMDTGGQV | |
| | | L31p, zinc- | | | | AKFNKRFAGIGTRTK | |
| | | independent | | | | | |
| GO_ | GO_ | hypothetical | H | | Up | MTLPLMPKATAVWLIEKTGL | 112 |
| 2006 | 2006 | protein | | | | TFTQIAEFCGMHPLEVQAIA | |
| | | | | | | DGEVAAGINGYDPIKNHQLA | |
| | | | | | | EAEIKRCEADTNARLKIMPT | |
| | | | | | | SSPVKRRAKGARYTPVAKRN | |
| | | | | | | DRPDAIAFVLRQFPQLSEAQ | |
| | | | | | | IVKLLGTTKDTITKVRDRQH | |
| | | | | | | WNSANIKPRDPVILGLCTQT | |
| | | | | | | DLNAAVTAANDRLAREGHAL | |
| | | | | | | PVVEAYVPDSDSHA | |
| GO_ | GO_ | Phosphoribosylamin | H | | Up | MARRRQLYEGKAKVLFEGPE | 113 |
| 2062 | 2062 | oimidazole- | | | | PGTLVQYFKDDATAGNGAKS | |
| | | succinocarboxamides | | | | GIITGKGVLNNRISEYLMLK | |
| | | ynthase | | | | LHEINIPTHFIRRLNMREQL | |
| | | (EC 6.3.2.6) | | | | IREVEIIPLEVVVRNVAAGS | |
| | | | | | | LSKRLGIPEGTRLPRTIIEY | |
| | | | | | | YYKNDALGDPMVSEEHIAAF | |
| | | | | | | NWAAPQDMDDMNQLALRIND | |
| | | | | | | FLMGMFTAVGITLVDFKLEF | |
| | | | | | | GRIWEGEEMRILLADEISPD | |
| | | | | | | NCRLWDSKTNEKMDKDRFRR | |
| | | | | | | DMGRVEEAYQEVAKRLGILP | |
| | | | | | | ESGNGDLKGPEAVQ | |
| GO_ | GO_ | Anthranilate | H | | Up | MTVSADFTSLLHKAALGRHL | 114 |
| 2075 | 2075 | phosphoribosyl | | | | DSHEAETAFHAIMAGEVDPI | |
| | | transferase | | | | QLAAFLTALKLRGETFAELT | |
| | | (EC 2.4.2.18) | | | | GAVQAVRHHMTVLPDVPAGA | |
| | | | | | | IDVCGTGGDGLKTLNVSTAV | |
| | | | | | | AFVLAGLGVPVAKHGNRALS | |
| | | | | | | SATGATDVLEVLGIPPTDDL | |
| | | | | | | ALQGRRLREDGLVFLAAPQH | |
| | | | | | | HPAMRHAAPVRKALGFRTLF | |
| | | | | | | NLLGPLCNPAQVRHQLIGVF | |
| | | | | | | DGRWCEPVARALGALGSLSV | |
| | | | | | | WVVHGSTEEGGSDELTLAGP | |
| | | | | | | SQVSAWQDDTLFSFGIEPDM | |
| | | | | | | AGLAAAPISAIRGGDAQTNA | |
| | | | | | | AALLALLDGAGGAYRDTVLL | |
| | | | | | | NAAAALHVAGRGDIVKAGAI | |
| | | | | | | DVPAFRRNVGMAADSIDRGL | |
| | | | | | | ARAALEAARMSAHSIAPKDA | |
| | | | | | | GRS | |
| GO_ | GO_ | LSU ribosomal | H | | Up | MGKSNVIQIRLVSSAETGYF | 115 |
| 2086 | 2086 | protein | | | | YVTKKNARSATGKMEVRKYD | |
| | | L33pprotein | | | | PVARKHVVFREAKIK | |
| | | L33p, zinc- | | | | | |
| | | independent | | | | | |
| GO_ | hpnB | Hopene-associated | H | | Up | MLFGTALTSLGAWIYLSLFH | 116 |
| 2109 | | glycosyltransferase | | | | GKFWQKGPILAQKPTPVCAP | |
| | | HpnB | | | | DVAVVVPARDEADSIRECLT | |
| | | | | | | SLLEQDYDGKLSVILVDDES | |
| | | | | | | ADGTGDIARALPDPHHRLTV | |
| | | | | | | ISGQKRPAGWSGKLWAVHQG | |
| | | | | | | EQEALTRIGPYGYILLTDAD | |
| | | | | | | IMHAPGHLASLVAKAREDDL | |
| | | | | | | DLVSEMVALNCESTAERFLV | |
| | | | | | | PAFVYFFAMLYPFSRIASEH | |
| | | | | | | SRIAGAAGGTILLRRRALER | |
| | | | | | | IGGISALRGALIDDCTLAAH | |
| | | | | | | VKRSGGRLYLGHSALAWSVR | |
| | | | | | | PYRGMKDVWHMIARTAYVQL | |
| | | | | | | RYSPVLLIATIIGMATIWLL | |
| | | | | | | PVALALFGKGRERRVGLLTY | |
| | | | | | | LLSCLTFVPTLRRFGLPLWR | |
| | | | | | | AIPLPLVAAFYMAATIGSAF | |
| | | | | | | DHHRGVGVRWKNRSYTDETS | |
| GO_ | GO_ | Predicted integral | H | | Up | MSKRYVTKTLKKTLPVLLSL | 117 |
| 2111 | 2111 | membrane protein | | | | LGVALFTFIAAKAGIHPVME | |
| | | | | | | ALSKVGVGGFLLLAACQLLI | |
| | | | | | | DMGLGVAWHAAVPLLSVRRL | |
| | | | | | | MGARLVRDSAGACLPFSQLG | |
| | | | | | | GMVIGVRATLAGVDPRTVKG | |
| | | | | | | EELHWPEGVAANLVDITTEV | |
| | | | | | | LGQIAFVLIALLCLIGHHGA | |
| | | | | | | SRFVWPLIGGMVLLSLGIAG | |
| | | | | | | FIWTQQRGGVMVRKAAAFLG | |
| | | | | | | KHIAAEWRDSLIGNTETFQL | |
| | | | | | | RLESLWSRPDRISLGAFCHL | |
| | | | | | | LCWMGSAAMTWLALQLLGAH | |
| | | | | | | VGFFSSVAIEGVVCGIMSAG | |
| | | | | | | FLVPGALGVQEAAYVALGMI | |
| | | | | | | FGIDAEISLSLSLLRRGRDI | |
| | | | | | | LIGIPVLLAWQIVEMRRLRH | |
| | | | | | | APPSEASKSTPAPSPASARK | |
| | | | | | | TVIPPAVTALAGNIKKEATS | |
| | | | | | | RDGKKTEDTPFATAPRVL | |
| GO_ | GO_ | UDP-N- | H | | Up | MKVLVTGVAGFIGFHVAHAL | 118 |
| 2144 | 2144 | acetylglucosamine 4- | | | | LKQGMEVVGVDTLNAYYDPA | |
| | | epimerase | | | | LKAARLEQLEPYPGFSFLKV | |
| | | | | | | DVASPAAMQDLVARHPDLEG | |
| | | | | | | VIHLAAQAGVRHSMVDPYSY | |
| | | | | | | VTSNVMGQVALLEACRHLKK | |
| | | | | | | LTHVVYASSSSVYGRNQSVP | |
| | | | | | | FRETDRVERPSSVYAVTKRA | |
| | | | | | | AELMSESYAYLHGIPQTGLR | |
| | | | | | | FFTVYGPWGRPDMAYYGFAK | |
| | | | | | | AISEGRPVTLYEGKHLSRDF | |
| | | | | | | TYIDDIVRGVQRVLGRPPEA | |
| | | | | | | GMSRVLNLGGDKPERVTRMI | |
| | | | | | | ELLEQNLGKKAFVERRPRPV | |
| | | | | | | ADMESTWASLENVREFCGWK | |
| | | | | | | PVVSFEEGMKEFCLWFRKFH | |
| | | | | | | GI | |
| GO_ | GO_ | hypothetical | H | | Up | MRVLCCALVAALGMSAGVAK | 119 |
| 2145 | 2145 | protein | | | | AEDPITQAQARLPTAPLTIT | |
| | | | | | | TRDGQKHEFTVELAKTYRQQ | |
| | | | | | | EVGEMFRKHLPENEGMLFMW | |
| | | | | | | ATPQVSDMWMRNTLVPLDIV | |
| | | | | | | FIDSTNHIHAIAENAVPLSE | |
| | | | | | | AILRSDGVVANTLELAGGVT | |
| | | | | | | AKLGIRVGDAVTSSALKH | |
| GO_ | GO_ | hypothetical | H | | Up | MKHKSCRKTFFSALALSAIA | 120 |
| 2148 | 2148 | protein | | | | FFSGQAQARHSSGHHGRTVF | |
| | | | | | | HSHRSSSHRHSYAHVIQCVA | |
| | | | | | | YAKTASEVVLHGNARDWWYN | |
| | | | | | | AAGVYARGSAPQAGSVLNFR | |
| | | | | | | AIRRMPLGHVAVVRSVEDSR | |
| | | | | | | TIYIDQSHWASNGIAHNVRV | |
| | | | | | | VDVSPNNDWSAVRVALNDRS | |
| | | | | | | GRLGSIYPTYGFIYPHSDNG | |
| | | | | | | DRNPAPHVVMARASTVSGFR | |
| | | | | | | HRAVLNGSDALSHPMNSTEV | |
| | | | | | | AEAPDDAFTSDAPDRSIR | |
| GO_ | GO_ | Ribonucleotide | H | | Up | MTDPDDSALRSVTLPAAWDD | 121 |
| 2185 | 2185 | reductase of | | | | EAAQALAQITLNGGPVRLAA | |
| | | class II | | | | EAARWVDTIDACPPLPGTPA | |
| | | (coenzymeB12- | | | | NTPSPGRSLSYLLLMQQMAP | |
| | | dependent) (EC | | | | NTALWQCQPDQTPGFTIRLS | |
| | | 1.17.4.1) | | | | SFVQEAGFAAEHFVACLRLA | |
| | | | | | | CDALRRLHAATRIERTGELP | |
| | | | | | | LFDLPAQPEDEAAGLILLTD | |
| | | | | | | LDACLAALGLDYDSDDARTA | |
| | | | | | | ACAMAALATTVARAGTKLSP | |
| | | | | | | PSIPESPLPGLRTIASSVCA | |
| | | | | | | TEEGRHFCPIETGFSSPAAT | |
| | | | | | | EGLLGVETCGLAPAFSPLRE | |
| | | | | | | DGHLRASTLARLACRGLTPE | |
| | | | | | | SALALALAGETPLPPVRPQA | |
| | | | | | | QAAMHAAVKNVVDFLPAVPE | |
| | | | | | | PDLADLQARLARGVRRPLPM | |
| | | | | | | RQTGFTQRAAVGGHSLFMRT | |
| | | | | | | SEFEDGTLGEISLTPPRESP | |
| | | | | | | MARGLMDCLGHAVSIGLQYG | |
| | | | | | | APLEAFVERFAYTRFGPAGT | |
| | | | | | | VEGDPSTAYATSMLDYAFRT | |
| | | | | | | LSEAYLGEHMPDAPRVEPSS | |
| | | | | | | EDPAPMLPFGRGSGESPEWK | |
| | | | | | | DRGRRLKLVS | |
| GO_ | GO_ | Uncharacterized | H | | Up | MTLNLRHYALLGLLAFLLAL | 122 |
| 2192 | 2192 | integral | | | | PGRMTLPPLDRDEPRYMEAS | |
| | | membrane, | | | | EQMLLSHNFIDVRFQDKPRY | |
| | | glycosyltransferase | | | | LQPAGIYWLEAASTAAAEKI | |
| | | | | | | FGPSVLRKTWPYRIPSLLAA | |
| | | | | | | TIIVPLTAWIGATLFGGATG | |
| | | | | | | LMAAGLLMVSTLFVAESHMA | |
| | | | | | | TIDTVLLLDILCIEAALLCA | |
| | | | | | | LTDRQKSRPTHLRVAVAYWL | |
| | | | | | | ALGVGLMLKGPVVLIPGFGT | |
| | | | | | | PLALWFLEKDRSWWPRLRPR | |
| | | | | | | WGWMLMIAVVVPWCVAIEVI | |
| | | | | | | SGGDFFARAVGRNFLGKVTH | |
| | | | | | | GQEAHGLPPGFHLLVFGLAF | |
| | | | | | | WPGSLFAALAIPSVWKNRKL | |
| | | | | | | PQVRFLLSWIVPHWLVFELI | |
| | | | | | | ATKLPHYVLPTYPAIAILTA | |
| | | | | | | ASLMAWRPLTLSRWAKALLG | |
| | | | | | | VYGVLWAVIGIAFCLAGSIA | |
| | | | | | | LYKLEHTFSLSALIALGGSL | |
| | | | | | | PLMLGAIMMLLKQQRRQAAF | |
| | | | | | | CAMGAAVIAHAGLFLSVIPN | |
| | | | | | | LQTIRLSPRIADLFEDVRPC | |
| | | | | | | NDSVLISSSYSEPSLVFLVG | |
| | | | | | | PNTQLIGPEAAAAYLHDHPQ | |
| | | | | | | CSLALIDIKDKNIFMSTLKK | |
| | | | | | | FGINVVEYNKIEGLNYSNGH | |
| | | | | | | HLNLELFAPL | |
| GO_ | GO_ | S- | H | | Up | MNALAQLGMVSELPRDIQNG | 123 |
| 2210 | 2210 | adenosylmethionine | | | | AAHLVEEERKDYFIERDGER | |
| | | decarboxylase | | | | YAGNHLLIDFWDARNLDDPM | |
| | | proenzyme | | | | RIDETLCEAAVAAGATILHS | |
| | | (EC 4.1.1.50), | | | | HFHHFTPNGGVSGVIVLAES | |
| | | prokaryotic | | | | HISIHTWPERNYAAVDVFMC | |
| | | class 1B | | | | GACDPNLSIPVMQRLFQAGR | |
| | | | | | | IEVDAVRRGRVQDKAVKAA | |
| GO_ | GO_ | tRNA | H | | Up | MNAPKTTEAKTAIIVAGPTC | 124 |
| 2214 | 2214 | dimethylallyl | | | | SGKSALALDLARTFGGTVIN | |
| | | transferase | | | | ADSMQVYRDLRILTARPDAA | |
| | | (EC 2.5.1.75) | | | | DEAAVPHRLYGVLDAAVPGS | |
| | | | | | | VAWWRAEALREMDAAWAEGR | |
| | | | | | | MPVLCGGTGMYLRALTDGLV | |
| | | | | | | EVPDPGDAARTEARGLAEEI | |
| | | | | | | GPEGLHARLMQVDPETASGL | |
| | | | | | | RPNDTQRISRAWEVWTGTGR | |
| | | | | | | GLAWWRSQPGLPPAPCRFVS | |
| | | | | | | VRLDPERDGLRRAIDSRFAQ | |
| | | | | | | MLDAGAIEEVSHLLERGLDP | |
| | | | | | | VLPAMRAHGVPELASVLRGD | |
| | | | | | | VTLEEARKSAVLAIGRYTRR | |
| | | | | | | QATWFRHHALGEAEDSMVSL | |
| | | | | | | RRYTHSAQESESHYEKIENF | |
| | | | | | | ISERVDAAALSS | |
| GO_ | GO_ | hypothetical | H | | Up | MLVHYGYGVVGIIVMFESMG | 125 |
| 2262 | 2262 | protein | | | | LPLPAESVIIAASLYAGSTH | |
| | | | | | | HLEIRWIALAAVLGAIMGDN | |
| | | | | | | IGYLIGHHFGYGILKKHGYK | |
| | | | | | | VGMTEERLMLGRYLFRKHGG | |
| | | | | | | IVVFLGRFIAVLRVFVALLA | |
| | | | | | | GANRMPWHSFLFFNAMGGIC | |
| | | | | | | WAGGYAFVTYELGKQIEKIS | |
| | | | | | | GPVGVVMAILGVSCLIGALV | |
| | | | | | | FLKKNEKRLTEEALREAEAD | |
| | | | | | | EKRDEARADTKPS | |
| GO_ | GO_ | Histidinol | H | | Up | MKRLDTSAAGFSEDFAKLLA | 126 |
| 2297 | 2297 | dehydrogenase | | | | ARGSDERSVAEPVRAILADV | |
| | | (EC 1.1.1.23) | | | | RSRGDEALCDYTARFDRLTL | |
| | | | | | | PAEKLRISTEEIASEAARVP | |
| | | | | | | ADLMDALRTAARRIETFHAA | |
| | | | | | | QMPKDLDFTDEDGIRLGMRW | |
| | | | | | | TPLDAVGLYVPGGKAAYPSS | |
| | | | | | | VLMNALPARVAGVKRLAMCV | |
| | | | | | | PSPGGVLNPLVLAAAQLCGV | |
| | | | | | | EEIYRIGGAQAVGAMAFGTD | |
| | | | | | | LIALVDRIVGPGNAYVAEAK | |
| | | | | | | RQVFGHVGIDSIAGPSEVVV | |
| | | | | | | VADGQNDPRLVALDLLAQAE | |
| | | | | | | HDEQAQAILITTDAAFADRA | |
| | | | | | | AEAVRKELETLPRTTIASKS | |
| | | | | | | WDDHGAIIVVRSLEEAAEIV | |
| | | | | | | NALAPEHLEVMLDAPRDFSA | |
| | | | | | | MIRHAGAIFMGRYCPEAVGD | |
| | | | | | | YVGGPNHVLPTSRTARFASG | |
| | | | | | | LSVFDFIKRTTTIETDEAGL | |
| | | | | | | RRIGPAGVALATAEGLDAHA | |
| | | | | | | LSLSVRLEKN | |
| GO_ | GO_ | hypothetical | H | | Up | MPRHHSYRNRSLLALMVLEI | 127 |
| 2348 | 2348 | protein | | | | CVPRMAVAASPASAATPVTQ | |
| | | | | | | APLIQASVTQAPVTQTEEWI | |
| | | | | | | HVPSTERPPIQNYPHAGVVA | |
| | | | | | | QPRRVVASQNHAPQGRQGQW | |
| | | | | | | GAFSYGNGESAGFGPVGRYG | |
| | | | | | | VAPWAEDWSFLRDKSRRDDP | |
| | | | | | | FDPLKFIALNDAKTIWLSFS | |
| | | | | | | GETRLRNWYEETPFLGKKGG | |
| | | | | | | SNSGRFGVRNLYGADLHLGE | |
| | | | | | | HVRLFGQLINADAAGWKGFG | |
| | | | | | | YNTTYRKRLDLQQAFIEFKG | |
| | | | | | | KLAGAQTGFMFGRQQFLDAP | |
| | | | | | | SYVLYNRETPNVPLSWNGGR | |
| | | | | | | IYAIWPNIRVDAFDFVQTKT | |
| | | | | | | DATLMFHDTEDYGTRLYGGD | |
| | | | | | | ITALVPQFSIGGETVHSFLD | |
| | | | | | | VFYYGYRYGGSLSVVPLASG | |
| | | | | | | SLKGTSSRGNVGFRWYGTAA | |
| | | | | | | SFEYSFGGLYQDGTFQKSGS | |
| | | | | | | EHKSGVQAYSINTIVGYRHT | |
| | | | | | | PSPLHPFIGVQADLYSGGAN | |
| | | | | | | GTNGPVRTYMAPFNPQTNYL | |
| | | | | | | DTTTYIQPSNLVSLSPVLSV | |
| | | | | | | TPWKGFASIQFKVPFMWREN | |
| | | | | | | ADGAIWNSSGPYTFSKTYHG | |
| | | | | | | GYIGVVPQASLKLQLNRHLT | |
| | | | | | | WQIYGARFMASNGLHAAGGK | |
| | | | | | | SGSYAQSNVVFRF | |
| GO_ | GO_ | hypothetical | H | | Up | MRQPLPARLALIALLGCGLA | 128 |
| 2355 | 2355 | protein | | | | ALPDSARAEPAIMPPPPPAP | |
| | | | | | | PAPPSLQAPLTASGTLVIPA | |
| | | | | | | TCLDRLSIVGGENAHIVSGS | |
| | | | | | | GSLEKHGDRLTFTTSPQDCA | |
| | | | | | | TQDSAVVMVPALTSIDIQLP | |
| | | | | | | HSRLTTYRITGVNGDVTAIS | |
| | | | | | | GRGNIDIDQASGLTLTMQST | |
| | | | | | | GNVSVGHVTGRLSVQNLSSG | |
| | | | | | | DLHIGDLAASSASITAMSSG | |
| | | | | | | DIRVEQGTVDVLTVRDYGSS | |
| | | | | | | TITLNAEARDADITLLGSGD | |
| | | | | | | ITLRKVSEALKKRPIGSGTL | |
| | | | | | | SIGDATSSRITSVNTPDGAA | |
| | | | | | | ILSDATRKILDRLDIQLDSP | |
| | | | | | | DHVSRTTDHNRHHSGGYGVI | |
| | | | | | | GVLLKIALIVWAVRLFRRYR | |
| | | | | | | RTGVLPFRKTLDKAAAGYAE | |
| | | | | | | GVQSWSRHRAAWRDTPGASA | |
| | | | | | | TAVVRDTMAGFRRQQPDPAE | |
| | | | | | | DFSRSVAPGHPLARLQDRLV | |
| | | | | | | RMERRLGLMEQFVTSPDFSL | |
| | | | | | | ERQFRDLERADGRRA | |
| GO_ | GO_ | Creatinine | H | | Up | MLFLRRLSCRVALLCVGMGL | 129 |
| 2373 | 2373 | amidohydrolase | | | | SVPAVRAQGVLEAPPHCSGL | |
| | | (EC 3.5.2.10) | | | | ALQAEFACRSWTEVAQDVKA | |
| | | | | | | GTDTVIIPVGGTEQSGPYMA | |
| | | | | | | VGKHNVRAQVLADAIAVQAG | |
| | | | | | | HTLVAPVVAYVPEGSTSPRT | |
| | | | | | | SHMKFPGTISIPPAVFEGLL | |
| | | | | | | KGAAESFRVQGFRRIVLLGD | |
| | | | | | | HGGYQSFMAQVAQELNRAWK | |
| | | | | | | GQAAVLYLRDYYEVVPHQYA | |
| | | | | | | EALRAQGHAAEVGLHAELSD | |
| | | | | | | TSLMLAVDPSLVRQDALRAA | |
| | | | | | | PKPGVAEGVYGGDPRRASAG | |
| | | | | | | LGRIGTEMQIRTAVAAIQSF | |
| | | | | | | QRSHP | |
| GO_ | GO_ | hypothetical | H | | Up | MTFKTPLLVAMTLLGAAAAH | 130 |
| 2374 | 2374 | protein | | | | AQEYSPSAPMVPVPADASAP | |
| | | | | | | VAAPVAPSGIQTIPGMPPVI | |
| | | | | | | DPKNIYSETTPSHISPAIAH | |
| | | | | | | DPARVYVPNLRGDSVSVIDP | |
| | | | | | | ASFQVVDTFRVGHSPQHVVP | |
| | | | | | | SWDLRMLWVINNSEGRPDGS | |
| | | | | | | LTPINPATAKPGPSIAVDDP | |
| | | | | | | YNMYFTPDGKYAITVAEAHK | |
| | | | | | | RLDFRDPHTMELKGSVETPE | |
| | | | | | | CKGVNHADFSIDGKYAIFTC | |
| | | | | | | EFGGYVAKVDTVNLKMIGML | |
| | | | | | | KLSKGGMPQDILTAPDGHKF | |
| | | | | | | YVADMMADGVFVVDGDSFTE | |
| | | | | | | TGFIPTGIGTHGLYPSRDGK | |
| | | | | | | LMYVANRGSHRIHGPKHGPG | |
| | | | | | | GVSIIDFATDKVIKTWMIPG | |
| | | | | | | GGSPDMGNVSADGKLLWLSG | |
| | | | | | | RFDDVVYAIDTDTGAMRKIP | |
| | | | | | | VGAEPHGLTVWPQPGRYSVG | |
| | | | | | | HTGILR | |
| GO_ | GO_ | 5-hydroxyisourate | H | | Up | MSSLSTHVLDTVSGKPAAGV | 131 |
| 2388 | 2388 | hydrolase | | | | SLRLLQGDRVLFEGQTNTDG | |
| | | (EC 3.5.2.17) | | | | RCPELRDVAVSKGIYCLEFQ | |
| | | | | | | IGDYFRKGGQVLSDPPFLDV | |
| | | | | | | VPIVFGLAAEAHAHVPLLAA | |
| | | | | | | PFGYSTYRGS | |
| GO_ | GO_ | Pyridoxamine | H | | Up | MSDIPLIDLKADPFALFAAW | 132 |
| 2435 | 2435 | 5′-phosphate | | | | MSDAEKSEPNDPNAMAVATA | |
| | | oxidase | | | | TPDGRPSVRMLLLKGVDERG | |
| | | (EC 1.4.3.5) | | | | FVFYTNLESRKGRELLSNPH | |
| | | | | | | VALLFHWKSLRRQIRIEGPV | |
| | | | | | | EAVSTTEADAYFASRSRMSR | |
| | | | | | | LGAIASDQSRPLDDRSTFEE | |
| | | | | | | RLKAVDGKYGDGPIPRPANW | |
| | | | | | | SGFRVLPEAIEFWQDRPYRL | |
| | | | | | | HDRAVWTRDGNGWNVTRLYP | |
| GO_ | GO_ | hypothetical | H | | Up | MLIDIKNILLPLNGSGDLEA | 133 |
| 2436 | 2436 | protein | | | | VMSVALDFARRFDAHLSAVV | |
| | | | | | | VGSDPSEVATLAGEGISAGM | |
| | | | | | | VNEMIDTATTEAQRRAISIR | |
| | | | | | | KAFDAFIHEHGIRRVEPSKI | |
| | | | | | | GSSAGDGVSASLDVLNGTEH | |
| | | | | | | DSLTWRSRLADMTLVPNLAK | |
| | | | | | | DGDPRASETLHAILFDSGRP | |
| | | | | | | LVIAPPAPPKTVGKRIAIAW | |
| | | | | | | NGTPEASLALRCILPWAHKA | |
| | | | | | | EGVQVLTCQDYQRRGPGADE | |
| | | | | | | VVTYLRMHGISATSREFEAV | |
| | | | | | | NRDIGAGLLKAATEFNADML | |
| | | | | | | GMGAYSHSRLRQMILGGVTR | |
| | | | | | | HILEQAQLTVLMSR | |
| GO_ | GO_ | Polyphosphate | H | | Up | MRSVFLCVPEDPIVTTEDSR | 134 |
| 2485 | 2485 | kinase | | | | PAPRRRSPRKPRNAVTPAQN | |
| | | (EC 2.7.4.1) | | | | RGRRRQTAAARAEDYAHMLT | |
| | | | | | | SPERFLNRELSWLDFNQRVI | |
| | | | | | | DEAENPRNPLLERVRFLSIS | |
| | | | | | | SSNLDEFYSVRVAGLVGQVR | |
| | | | | | | EGTVVRSPDGLTPAQQLVQV | |
| | | | | | | RQKARHLLAEQQRVWHLLEG | |
| | | | | | | ELKEAGIVILPTDSLDETDL | |
| | | | | | | AQLSTLFDERVFPVLTPMAV | |
| | | | | | | DPSHPLPFIPNMGLALHMRL | |
| | | | | | | KDAASSAHVMDGLILLPAQV | |
| | | | | | | PRFLRLPARLKEGQETPDQI | |
| | | | | | | RFVLLEDLITLFAGRLFPGL | |
| | | | | | | VIGAAGVLRVIRDTDVEFED | |
| | | | | | | EAEDLVRSYETALKQRRRGV | |
| | | | | | | CIHLALDRKLPDTLGREMGE | |
| | | | | | | ELGVGEEDVVVLPSFVGVTD | |
| | | | | | | LKQLIVDDRPDLVFPPYTPR | |
| | | | | | | FPERVLDYDGDCFAAIRAKD | |
| | | | | | | MLVHHPFESFDVVVQFLRQA | |
| | | | | | | ALDPNVLAIKQTLYRTSRDS | |
| | | | | | | PIVHALIEAAEAGKSVTAMV | |
| | | | | | | ELRARFDEEANIRLSRALEA | |
| | | | | | | AGVQVVFGFAHLKTHAKLSL | |
| | | | | | | VVRRENGSLRSYAHFGTGNY | |
| | | | | | | HPITARIYTDLSFFTCDPKL | |
| | | | | | | ASDSARLFNYMTGYAIPAKM | |
| | | | | | | DALAFSPITIRSTLEQLIQD | |
| | | | | | | EIDHAKAGRPGRIWLKMNSL | |
| | | | | | | VDAELIDRLYKASQAGVKII | |
| | | | | | | GIIRGICCLRPGVPGLSDNI | |
| | | | | | | EIKSIVGRFLEHARVFAFGN | |
| | | | | | | GHRMPSHKAKVFISSADWMV | |
| | | | | | | RNMDWRVEAMVPITNPTVHA | |
| | | | | | | QILGQIMTMNIKDNLQSWTL | |
| | | | | | | TRDGYWHRVSPGAHPFSAHE | |
| | | | | | | YFMNNPSLSGRGSAAREKVL | |
| | | | | | | PEAHRPRERPDRILED | |
| GO_ | GO_ | UDP-N- | H | | Up | MPARRIALNVVLDGVVSAAA | 135 |
| 2496 | 2496 | acetylglucosamine | | | | APVARWLADPAGGWLHPLWF | |
| | | 4,6-dehydratase | | | | IAGGGITLLVGGLPFRIPQQ | |
| | | (EC | | | | YWRFSGVADLFNIACASVLS | |
| | | 4.2.1.135) | | | | ALLFAELLHVAGYPLPTPTF | |
| | | | | | | PIIHALVLLVFLGAIRMMWR | |
| | | | | | | LAARRRSLALDGERILLLGA | |
| | | | | | | DHEADLFIRAMERDSGNNRR | |
| | | | | | | VVGLLTGGAQQAGRRIHDCP | |
| | | | | | | ILGTISETPAILERLFAAGK | |
| | | | | | | LPDALVITAGEIKGRELAQI | |
| | | | | | | LEAARVYDIDVQRTPSLTAL | |
| | | | | | | QPADRVELRPIAIEDLLNRP | |
| | | | | | | PVALDSQGMARLICGRVIAV | |
| | | | | | | TGAGGSIGSELARQIASFQP | |
| | | | | | | AMLLLIESSEYALWQINLDI | |
| | | | | | | SERFADVKRQQIIADVRDRR | |
| | | | | | | RIAEVFGMYRPHLVFHAAAL | |
| | | | | | | KHVPIVEDNPVEGVLTNVIG | |
| | | | | | | TRIVADEAERAGAQAMVMIS | |
| | | | | | | TDKAVNPSSLMGASKRCAEV | |
| | | | | | | YGQALDMRARAGQGGMRCVT | |
| | | | | | | VRFGNVLGSTGSVVPLFRRQ | |
| | | | | | | LEHGGPLTVTHPDMTRYFMT | |
| | | | | | | VPEAVGLVLQAAVRGTHERA | |
| | | | | | | QNDATDLRLRQGGIFVLDMG | |
| | | | | | | DPVRIMDLAFQMIRLAGLRP | |
| | | | | | | ETDIEIRFTGLRPGEKLFEE | |
| | | | | | | LFHGREAPVPTDAPGLRMAS | |
| | | | | | | PRTVDFKVAAAAMDELETAC | |
| | | | | | | HASDLGAIMSILYRLVPEFL | |
| | | | | | | HNRDGGMPVAMSHPDPEMIA | |
| | | | | | | P | |
| GO_ | GO_ | Putative | H | | Up | MGMPGDNRPQDVQVSSVMEE | 136 |
| 2511 | 2511 | transmembrane | | | | ERLSVDVGAAGGTCVETGQR | |
| | | protein | | | | KRRWQVFMSRAPALVGLVLL | |
| | | | | | | VAAVVVIWRELQHLSLHDIT | |
| | | | | | | ASLSAIPDSALLAGGAATVL | |
| | | | | | | SYFILSFYDRLACLHVRAKV | |
| | | | | | | SYQRSAFAAFCSYVLSHNLG | |
| | | | | | | CAAISGAAVRFRLYRSWGVA | |
| | | | | | | PGAIAQIIAFCSATYLLGTM | |
| | | | | | | ALIGGILIIEPHAVPVLSHL | |
| | | | | | | PEFLLRLAGLALWGVLLAYV | |
| | | | | | | LVARVRRHVRIWKYEIELPG | |
| | | | | | | PGIAIAQIAVSAADMAATAL | |
| | | | | | | IAYCVLPPLPPEAHFGFGTF | |
| | | | | | | LAIYLASYTAGLMASVPGGL | |
| | | | | | | GVEDGAMLLALQAYLPASQI | |
| | | | | | | MGAILVFRLFYYIIPLLLAG | |
| | | | | | | LMFAGHELFLRGEQALVSAG | |
| | | | | | | QTPRRVRPSQVIRESEADFS | |
| | | | | | | VAVATSVQAVVGILLVLYAL | |
| | | | | | | VADLPPLQTSLGAAVSQIAD | |
| | | | | | | LLLTVAGVGLVALSWGLSQR | |
| | | | | | | VALAWKFSLGMLGSAALLLM | |
| | | | | | | LRHAPWEGPVVIVLVMLLLL | |
| | | | | | | PFRNCYYRRAHLLAAPLTPS | |
| | | | | | | MLAPLSLWGLGLLGVGWVAV | |
| | | | | | | QRHLGPIWWRSMIYDAHTAV | |
| | | | | | | GRWFLGFSALCGFYVLWRGM | |
| | | | | | | RRTRIRFEAWTAENAHRYHS | |
| | | | | | | LAHALPQLGARRPTGLLLDE | |
| | | | | | | AGRAAIPFLRTGQFIIGLGD | |
| | | | | | | PAGSERNCVAAIWRLRDLAL | |
| | | | | | | QEGCKLAFIQVGQSLMAVYN | |
| | | | | | | DLGLTVCPDRTAGTVCCFSE | |
| | | | | | | DYRMLRAFLKGEERLARKRQ | |
| | | | | | | PQTASGLTGS | |
| GO_ | GO_ | Glycerol-3- | H | | Up | MTTRPHIAVIGAGAWGTALA | 137 |
| 2544 | 2544 | phosphate | | | | CATAATGADVTLWMRNPVPP | |
| | | dehydrogenase | | | | GTRTLPRLPDITLPDNVTIT | |
| | | [NAD(P)+](EC | | | | GDFPRTADIALLVTPVQTAR | |
| | | 1.1.1.94) | | | | DVSTRLQTVLDPAVPVVTCC | |
| | | | | | | KGLEQATSLLPLDVLAETMP | |
| | | | | | | GRPTGVLSGPNFAIEVAKGL | |
| | | | | | | PAAATLACTDLALAQKLTAL | |
| | | | | | | LNTSSFRLYASDDAAGVQLA | |
| | | | | | | GAAKNVIAIGAGITIGAGLG | |
| | | | | | | ENARAALITRAVAEIGRLAE | |
| | | | | | | ATGGRASTLAGLAGMGDLIL | |
| | | | | | | TCTGRGSRNYSVGLELGEGR | |
| | | | | | | PLTDILASRTTVAEGVLTAP | |
| | | | | | | AMLALARQHNVRVPIIETVT | |
| | | | | | | RLLNDGVSIEEARHLLLDRP | |
| | | | | | | PTRE | |
| GO_ | GO_ | Heat shock | H | | Up | MSGRLFTSPMFLGFDHLEQM | 138 |
| 2589 | 2589 | protein, | | | | LERAAKSTSDGYPPYNIEQL | |
| | | Hsp20 family | | | | SSTALRITLAVAGFVMDDLQ | |
| | | | | | | ITQEDNQLVIRGRQADDSQG | |
| | | | | | | RIFLHRGIAARQFHKAFVLA | |
| | | | | | | EGIEIGGAWLDNGLLHIDLL | |
| | | | | | | RPEPEVRVKRIAISQGRRST | |
| | | | | | | APGPAVHHEVVPPVVKARRT | |
| | | | | | | TRPARDIDDE | |
| GO_ | GO_ | tRNA | H | | Up | MSDTQAAEPIAEPAIEPTGL | 139 |
| 2592 | 2592 | pseudouridine | | | | NRWALRIEYDGTGYLGWQKQ | |
| | | (38-40) | | | | NDGTSIQGLIEAAASKLVRN | |
| | | synthase | | | | RPVPSITAGRTDAGVHAAGM | |
| | | (EC | | | | VIHLDFPDDAPIDARQIRDG | |
| | | 5.4.99.12) | | | | MGYHLKPHRVVVLETAKVGP | |
| | | | | | | EWNARFSATWRSYRYTILNR | |
| | | | | | | PARPGLMENRVWHIKRPLDV | |
| | | | | | | DLMQQAANHLLGPHDFTSFR | |
| | | | | | | AVACQARSPIRTLDVLNIHR | |
| | | | | | | DGELVVIDTKARSFLHHQVR | |
| | | | | | | NMAGTLMMIGSRQWPVEKII | |
| | | | | | | EILEAKDRCAAGQTAPPEGL | |
| | | | | | | CLMDVGYPDDPFNRF | |
| GO_ | GO_ | UDP-3-O-[3- | H | | Up | MSDMTASESRPGDSRFFQRS | 140 |
| 2607 | 2607 | hydroxymyristoyl] | | | | GPFGLERLAEVSGSEIIPAA | |
| | | glucosamineN- | | | | SGKGLSEFRGVAPLHVAGPD | |
| | | acyltransferase | | | | EISFLDNRRYLPLLAETKAG | |
| | | (EC 2.3.1.191) | | | | AVILSPAFTDKLPPDTAGLA | |
| | | | | | | CKAPYLAWARVATLFHPAPA | |
| | | | | | | STGVRHPSAWIAEDAEIGEN | |
| | | | | | | VEIGPFAVIGSGVRIGRDSI | |
| | | | | | | VASHVSIGQSVEIGERCRIG | |
| | | | | | | AHAAISHARIGDRVTLYPGV | |
| | | | | | | RIGQDGFGFAVGPEGFETVP | |
| | | | | | | QLGLVVLEDGVEVGANSTID | |
| | | | | | | RGSMRDTLIGAGTRIDNLVQ | |
| | | | | | | IGHNARLGRCCIVVSQAGIS | |
| | | | | | | GSTELGDFVTIAAQAGLIGH | |
| | | | | | | IKIGSKARIGAQCGVMSDVD | |
| | | | | | | AGADVIGSPAMPFREFFRNV | |
| | | | | | | ATLRKLSRKSGD | |
| GO_ | GO_ | Periplasmic | H | | Up | MTLNSLMRTVSAGALLAATI | 141 |
| 2608 | 2608 | chaperone | | | | LVSAPGAHAQASGGNGGWFV | |
| | | of outer | | | | PKAAHPDAPPPRPVQRRVPE | |
| | | membrane | | | | AAPDEEEDSAPAEQQQAPPI | |
| | | proteins | | | | LPLPPIPAPPSIAKASPPPA | |
| | | Skp @ Outer | | | | AVIGVINVQAVMQISSAWQE | |
| | | membrane | | | | IQQVLGARRDRLAQAVQREE | |
| | | protein H | | | | AAWRGEQQKLQAQARSLTSD | |
| | | precursor | | | | QIQLRERHLQERRAKDQHDF | |
| | | | | | | GNQARIIQEAAQVAMHQIER | |
| | | | | | | ELEEPNGIIAAVAAAHNMNL | |
| | | | | | | ILHAEQVVLHVGGQDITEEV | |
| | | | | | | GTQLNKTLPHVFIPDDGVDP | |
| | | | | | | EQLARSGKMPTTADEQRQAQ | |
| | | | | | | GPQAPGQQQAPASAPSESVL | |
| | | | | | | RQHH | |
| GO_ | GO_ | hypothetical | H | | Up | MLLRQNERTALFIDGASLHH | 142 |
| 2622 | 2622 | protein | | | | AARNLGFEVDFRSLRNLFES | |
| | | | | | | QCLFQRAFYYAAMPETDDYS | |
| | | | | | | PLRPLTDWLAYNGYHLVLKN | |
| | | | | | | AREFTDHSGRRRIKGNMDVE | |
| | | | | | | LTVDLLEQAGRLDHAVIVSG | |
| | | | | | | DSDLRRAVEAVQARGVRVTV | |
| | | | | | | ISSMRSTPPMIGDDLRRQAD | |
| | | | | | | LFVELADIAPSFTRRQAEPR | |
| | | | | | | NPSRQGPVRHPADINSDETS | |
| | | | | | | DS | |
| GO_ | GO_ | Glutathione | H | | Up | MRILHHLPLSPQCRLVRLAL | 143 |
| 2643 | 2643 | S-transferase | | | | SEKRLPFEPVIERVWEQREE | |
| | | family | | | | FLHLNPAGEVPVLVEENGLA | |
| | | protein | | | | VPGGRVICEYLEDAYPDTPL | |
| | | | | | | LGRTFADRVETRRLVDWFDT | |
| | | | | | | RFAQEVTRNLLGEKVDKRQF | |
| | | | | | | GRGHPDGNALRAGYANMRFH | |
| | | | | | | LDYIGWLAETRSWLAGPALS | |
| | | | | | | LADFAAAAHLSALDFIGDVN | |
| | | | | | | WSKAPAAKDWYARVKSRPCF | |
| | | | | | | RGLLSDKVSGITPPAHYANL | |
| | | | | | | DF“ | |
| GO_ | czcA/cus | Cobalt-zinc- | H | | Up | MNAIVVTALKRPYTFVVLSI | 144 |
| 2649 | A | cadmium | | | | MILIFGVRAIVSTPTDVFPS | |
| | | resistance | | | | IKIPIVAVIWSYTGLMPDDM | |
| | | protein | | | | SGRIVYYYERALTATVSNIE | |
| | | CzcA; | | | | HIESSSYYGRGIVKIFFQPG | |
| | | Cation efflux | | | | TNTAVAQTQITSVSQTVIKQ | |
| | | system protein | | | | LPNGATPPLILAMDASSVPV | |
| | | CusA | | | | LTLQVNNPTMSGSEIYNMAS | |
| | | | | | | NLIRPELISVPGAAIPNPYG | |
| | | | | | | GLAPDIMVDIDPIKLLAHRL | |
| | | | | | | SPEDVAAALNLQNIVLPAGD | |
| | | | | | | QRIGQLDWMVKTNSTPLDLA | |
| | | | | | | VFNKMPVKQVGNSVIYLRDV | |
| | | | | | | AWVHRGGPPQINAVLVKGQQ | |
| | | | | | | AVLIVILKSGDASTLSVVSG | |
| | | | | | | IKKLLPQVQATLPAGTTVSI | |
| | | | | | | LTDASSFVKESVVDVVREMI | |
| | | | | | | TAAILTSLTVMLFLGSWRST | |
| | | | | | | VIVATSIPLAMLCSIIGLSI | |
| | | | | | | AGQSINVMTLGGLALAVGIL | |
| | | | | | | VDDATVMIENIDAHLETGKE | |
| | | | | | | LEDAIIDAANQIVIPTFVST | |
| | | | | | | TCICIVWLPLFELTGISGWL | |
| | | | | | | FMPMAEAIIFAMIASFILSR | |
| | | | | | | TLVPTMANWMLAAQVRMHRD | |
| | | | | | | PEWHNRKLSIFGRFQRGFEA | |
| | | | | | | RFTSFREHYKTILETLISIR | |
| | | | | | | GRFVTLFLLAAVSSMALLLF | |
| | | | | | | IGQDFFPEIKSGTLQMHMRA | |
| | | | | | | PIGSRLEETGKIAGLAERRI | |
| | | | | | | RSLLPGQVVNVVNNCGLPFS | |
| | | | | | | QLNQAMIPSPTVGSQDCDIT | |
| | | | | | | IQLRNSESPIAEYRRTLRKG | |
| | | | | | | LTNDFPGTIFTFQPGDLTAK | |
| | | | | | | ILNFGLPSPIDVQVVGRDLS | |
| | | | | | | DNFRFATQLAKKLRHIPGIT | |
| | | | | | | DVSIQEPMTQPTIMVNNRRS | |
| | | | | | | FALGTGITERDVALNALVTL | |
| | | | | | | SGSGQVGQTYYLNAQGTSQL | |
| | | | | | | IDVQAPANYLQTMNDLEILP | |
| | | | | | | IDKGDGNPTNQTPQLLGGLS | |
| | | | | | | ALVQTGTPSEIAHYNIMPVF | |
| | | | | | | DIYAAPEDMDLGTVSRAVNR | |
| | | | | | | IVNHERKLLPHGSSMVVRGQ | |
| | | | | | | AVTMNDAYVQLIGGLALSIV | |
| | | | | | | LVYLIIVVNFQSWLDPFVII | |
| | | | | | | TALPGALGGISWSLFLTHTA | |
| | | | | | | MSVPALTGAIMCMGTATANA | |
| | | | | | | ILVVSFARERMDHHGDAITA | |
| | | | | | | ALEAGYERIRPVLMTALAMM | |
| | | | | | | IGMIPMSVSNSDNAPLGKAV | |
| | | | | | | IGGLLVATVATLLFVPCVFA | |
| | | | | | | LIHYKRPAGPEGDRA | |
| GO_ | GO_ | Membrane- | H | | Up | MSHSADQGQVPPTNHPARTG | 145 |
| 2650 | 2650 | fusion | | | | SGTRGKLVLLVVILLAIALA | |
| | | protein | | | | AWGIVQRGAHYHSLTGATED | |
| | | | | | | AAIPPVTLIAPQPGPKTRQV | |
| | | | | | | DLPANLAAWYEAPIYAQVSG | |
| | | | | | | YVKMWYKDYGAHVKRGDVLA | |
| | | | | | | EISTPSIDAQFEAAKAHYNV | |
| | | | | | | ILARYNLALITTKRWTALKG | |
| | | | | | | TQAVSRQEVDVQAANAAAQK | |
| | | | | | | AELEAARHDVDRFQALEDFK | |
| | | | | | | KIVAPFDGIVTSRLVNVGDY | |
| | | | | | | VNAGGGNLNSRGTASELFSV | |
| | | | | | | ADVHRMRVFVSVPQDFASVI | |
| | | | | | | SPKIEAELTVPQYPGSHFRA | |
| | | | | | | TFLATANAFNAATRTVTTEL | |
| | | | | | | TLDNSDNLLWPNSYATAHIS | |
| | | | | | | APGNPNILILPEGAIIFRAE | |
| | | | | | | GTQVAKVINNHAHLVNVTVG | |
| | | | | | | INFGTTVQVLSGITKDDRVV | |
| | | | | | | ANPTADLLEGDEVKIVPTTP | |
| | | | | | | GYNTPSKAQQDADQQPVRQH | |
| | | | | | | DANPEEAGSR | |
| GO_ | GO_ | Efflux | H | | Up | MKPECSQSSPLQSSPSATAS | 146 |
| 2651 | 2651 | transport | | | | SRRNRSRWRITTALAGVFSI | |
| | | system, | | | | GLASCDLSPEYHPQKFLYPE | |
| | | outer | | | | GWEGKGLMVNAQPADGVVRS | |
| | | membrane | | | | DWWTMFNDPILDGLEKRMLA | |
| | | factor | | | | VNPDLQAAAEAFTQARDVAR | |
| | | (OMF) | | | | ETESRLYPQVTGAAHMSDNK | |
| | | lipoprotein | | | | GSIGRLYNNPATSSSLVYES | |
| | | | | | | NQAYSGAATWEPDFWNSIRN | |
| | | | | | | TTRMQKNLAQASAGQYALAR | |
| | | | | | | LSLEAELASDYIALRGLDAQ | |
| | | | | | | NAVYDDSIRYFRAAVEITEL | |
| | | | | | | RQAGSIGAGLDVSRAETQLY | |
| | | | | | | SAQAGKSNLIARRNVMEHAI | |
| | | | | | | AVLLNTAPAGFHIAPVKDVK | |
| | | | | | | MHFGVVKINAGLPASLLERR | |
| | | | | | | PDIAIAERQMAASARAIGVS | |
| | | | | | | RAAFYPHITFSAEGGFEDGG | |
| | | | | | | FDLASISRAFWKIAVQAVEP | |
| | | | | | | AFTGGLRRAALQRSWSQYRS | |
| | | | | | | MVDNYRSVVLSAFQDVEDGL | |
| | | | | | | TQTRQFKIAQDQQQKAVDAA | |
| | | | | | | LRTQSMTMALYTGGLSNYLD | |
| | | | | | | ALVAQQDALQARLAEVEVQT | |
| | | | | | | AQVQSSVRLVRALGGGWSAS | |
| | | | | | | DLPGIKQIDPFGPLQYKDLR | |
| | | | | | | TPKPVNGIDSHASPLDNDLR | |
| | | | | | | GDRVSENVP | |
| GO_ | GO_ | DNA-directed | H | | Up | MNELMKILGQTGQSVTFDQI | 147 |
| 2657 | 2657 | RNA | | | | KIQLASSEQVRSWSYGEIKK | |
| | | polymerase | | | | PETINYRTFKPERDGLFCAR | |
| | | beta′ | | | | IFGPIKDYECLCGKYKRMKF | |
| | | subunit (EC | | | | RGIVCEKCGVEVTLAKVRRE | |
| | | 2.7.7.6) | | | | RMGHIELASPVAHIWFLKSL | |
| | | | | | | PSRIATMLDLPLKDVEPVLY | |
| | | | | | | FEKFLVLDKGVCESDQIDSY | |
| | | | | | | KNGKKRDQYLLDEIRCEDLL | |
| | | | | | | DEYPDAGIDVGIGAEAIKRA | |
| | | | | | | LSSYDWGIPNDQERDLSLAA | |
| | | | | | | KEKGLPDPFDYDADVMEGDS | |
| | | | | | | EKTMMRKKLRKATSEAARKK | |
| | | | | | | LVKRLKLVEAFVESGSRPDW | |
| | | | | | | MIMDIVPVIPPELRPLVPLD | |
| | | | | | | GGRFATSDLNDLYRRVINRN | |
| | | | | | | NRLKRLIELRAPDIIVRNEK | |
| | | | | | | RMLQEAVDALFDNGRRGRAI | |
| | | | | | | TGANKRPLKSLSDMLKGKQG | |
| | | | | | | RFRQNLLGKRVDYSGRSVIV | |
| | | | | | | VGPELKLHQCGLPKKMALEL | |
| | | | | | | FKPFIYSKLEKYGHATTIKA | |
| | | | | | | AKRMVEKERPEVWDILEEVI | |
| | | | | | | REHPVMLNRAPTLHRLGIQA | |
| | | | | | | FEPTLIEGKAIQLHPLVCTA | |
| | | | | | | FNADFDGDQMAVHVPLSLEA | |
| | | | | | | QLEARVLMMSTNNILSPANG | |
| | | | | | | KPIIVPSQDIVLGLYYLSLE | |
| | | | | | | VPEYRETPDEAVIKDGKIVT | |
| | | | | | | AAPPAYSDVAEIESAMLSGS | |
| | | | | | | LKLHDKIRLRLPTIDADGKS | |
| | | | | | | VRQTIVTTPGRALIAQILPK | |
| | | | | | | HQAIPFSLINKQLTKKNVSD | |
| | | | | | | VIDTVYRHCGQKEAVIFCDR | |
| | | | | | | LMGLGFRHAARAGISFGKDD | |
| | | | | | | MIIPEAKATLVGKTSEEVKE | |
| | | | | | | FEQQYQDGLITAGERYNKVV | |
| | | | | | | DAWSRCTDEVQAAMLKEISK | |
| | | | | | | QVIGKPTNSVWMMSHSGARG | |
| | | | | | | SPAQMKQLAGMRGLMVKPSG | |
| | | | | | | EIIEQPIIANFKEGLSVLDY | |
| | | | | | | FTSSHGARKGLADTALKTAN | |
| | | | | | | SGYLTRRLVDVAQDCIIVEP | |
| | | | | | | DCGTERGLTVRAVMDSGEVV | |
| | | | | | | ASLSERILGRTLSKDVIHPV | |
| | | | | | | TQDVILPRNTLIEEAEAELI | |
| | | | | | | EKAGVESVDIRSVLTCDSRV | |
| | | | | | | GICAHCYGRDLARGTPVNIG | |
| | | | | | | EAVGVIAAQSIGEPGTQLTM | |
| | | | | | | RTFHIGGAATRGAEQSMVEA | |
| | | | | | | SRDGIVTIKNRNVVENSQKV | |
| | | | | | | LVVMSRNCEILLTDENGVER | |
| | | | | | | ARYRVPYGARLMVSEGEAVT | |
| | | | | | | RTQKMAEWDPYTLPIITEQA | |
| | | | | | | GTVEYLDLIDSITLVERMDE | |
| | | | | | | VTGLSSKVVVDYKQAAKGVD | |
| | | | | | | LRPRLQLKDASGNVVKLANG | |
| | | | | | | NDARYFLSPDSILSVENGAE | |
| | | | | | | VNAGDVLARIPREGSKTRDI | |
| | | | | | | TGGLPRVAELFEARRPKDHA | |
| | | | | | | IIAEGEGRIEFGKDYKSKRC | |
| | | | | | | VIVKNDDTGEETQYLIPKGK | |
| | | | | | | HVSVQEGDFVQKGDPLVDGP | |
| | | | | | | RVPHDILKVMGVEALSDYLV | |
| | | | | | | NEIQDVYRLQGVKINDKHIE | |
| | | | | | | VIVRQMLQKVEILEPGDSTY | |
| | | | | | | LIGETVDRIEYEGENQRLME | |
| | | | | | | NGDTPAKAMPVLQGITKASL | |
| | | | | | | QTQSFISAASFQETTRVLTD | |
| | | | | | | AATSGKVDTLNGLKENVIVG | |
| | | | | | | RLIPAGTGSVMNRLRGIAAS | |
| | | | | | | QDRQRVGGTSPKAVEDAAE | |
| GO_ | GO_ | hypothetical | H | | Up | MDADLEQYLEAGVGRLQDDA | 148 |
| 2689 | 2689 | protein | | | | STCSRMKGLEKKVSSAARET | |
| | | | | | | EALVSDLMVDQPLFWLLTSF | |
| | | | | | | FIGILLGKGLFRKS | |
| GO_ | GO_ | FIG139612: | H | | Up | MKSPSDTLRSLFRRNRDAAS | 149 |
| 2702 | 2702 | Possible | | | | SAPAVQAESLALPALVLEAE | |
| | | conserved | | | | KIAASLQSGVHGRRRSGAGE | |
| | | membrane | | | | DFWQFRPYHAGEPATSIDWR | |
| | | protein | | | | QSARSPVEDTFWVREREREN | |
| | | | | | | AQSLMLWCDPSPSMQWRSSD | |
| | | | | | | VLPTKAERAQLCTLALASAS | |
| | | | | | | LRGGEHAGLLTGIEAGRALA | |
| | | | | | | GRQVLPRLAASLLRPDADEP | |
| | | | | | | EFPRMALVPARSDLVVISDF | |
| | | | | | | LWDEDRIDTFLKTCASRPVR | |
| | | | | | | THLLCVLDPAERELKRSGRI | |
| | | | | | | RFEGLEGGVLTLPAMESLGP | |
| | | | | | | AYEQAMNAHLAALKQSAASL | |
| | | | | | | HADCIMHDTSQNPLPALLAL | |
| | | | | | | HMALGGGR | |
| GO_ | GO_ | DNA polymerase | H | | Up | MDVGFYHLTRTPLEEALPAL | 150 |
| 2752 | 2752 | III | | | | LGRTLDAGERALVRCPDAAA | |
| | | chi subunit (EC | | | | VMALDAALWACRDPVWLPHG | |
| | | 2.7.7.7) | | | | TAKSGHADRQPIWLTEGEDV | |
| | | | | | | PNGARFLFRVDGAGSDEFAP | |
| | | | | | | FTRIFDLFDGGNPQSVQRAR | |
| | | | | | | QRWVAMKSSGHNLVYWKQEE | |
| | | | | | | RGWKKAG | |
| GO_ | GO_ | hypothetical | H | | Up | MRSVSTSCPDRALHILASLF | 151 |
| 2755 | 2755 | protein | | | | HVDPVSLCLALLVIPACVQA | |
| | | | | | | MQPGRPGRAVVLCLATLAAV | |
| | | | | | | LGLSPAVQAVALGVIAAQDR | |
| | | | | | | EACPAVWSVPALLLSALFPA | |
| | | | | | | QTFVVLAVLPVLFWSALVRR | |
| | | | | | | SDGEQEGGPFPAVMGILGVS | |
| | | | | | | LVWHAPAAVSAELVAGLGAA | |
| | | | | | | VIGLLGRSVLGACRPGDLGL | |
| | | | | | | LRPVLLMVLVVAAQAEGLAV | |
| | | | | | | CARIALEAILLDLSLLVLTA | |
| | | | | | | ALGRVFPVLSVLRLPFPPLP | |
| | | | | | | GLVVLWLGIHAALGMAAGIE | |
| | | | | | | GWSVLGVAVALLLGLLGLSD | |
| | | | | | | ILVVGRVFSAWQGRVSGVSV | |
| | | | | | | LLVGAGSLLLPALVFGVVSP | |
| | | | | | | VLHFMGGEWVWPVWRMGGGD | |
| | | | | | | GASLRLPAFVLTGAVLWCVL | |
| | | | | | | VRPWRVAGGIVQAASTLLPA | |
| | | | | | | LGNLLSVGDGLFEEAPSLGW | |
| | | | | | | KIRCVIVAGRRRFMAVRGVK | |
| | | | | | | APVLPDLRQGAVGLWLVLLG | |
| | | | | | | LVLAVLGVMA | |
| GO_ | GO_ | Hydrogenase-4 | H | | Up | MIGMGRMIRSGERVALSHYH | 152 |
| 2759 | 2759 | component G | | | | LDAEQWSAMLSAPGTTLPLI | |
| | | | | | | SCWADDARAYVLLLEGDRPL | |
| | | | | | | VASTAVEERRYLAPSSRFAG | |
| | | | | | | AEWGERVAYDLYGVEAMDAR | |
| | | | | | | GNGAPALDEGGWTSTWPLSS | |
| | | | | | | RPGPAAGGLRPLAGRHLLRP | |
| | | | | | | EQTGLSGPLELSFEVLKGKV | |
| | | | | | | RSVEVCAGGAHRGVMSRLLG | |
| | | | | | | RTPEEAMPLVSRMTAGGFVA | |
| | | | | | | HPLAFARAVAQARGLVPGPG | |
| | | | | | | IRDVWMLLLEIERMSLHLFD | |
| | | | | | | MARTARGVDAELFATHCDHA | |
| | | | | | | REAIARACAEQGVSRRLMDM | |
| | | | | | | VACDGFREGLEIVPLAQAVH | |
| | | | | | | AAMQPRLAALEELHRVFAPR | |
| | | | | | | LDGFAVLDVRLAERFAVGGV | |
| | | | | | | TGRASGRSMDMRRREAGMRL | |
| | | | | | | EALRATGSSQGDARAREGLR | |
| | | | | | | LAEIRDSLKLLERILGSIGL | |
| | | | | | | EDDEPAPDRTDEGIGVAEGA | |
| | | | | | | RGDVWYWVRLKDGRIESLHV | |
| | | | | | | RDPGVSLLPVLGAMLRGYPV | |
| | | | | | | SRVPAALGSIGISPAGIAL | |
| GO_ | GO_ | SAM-dependent | H | | Up | MLTSLARIRSDDAATFYESR | 153 |
| 2764 | 2764 | methyltransferase 2, | | | | QGQRTALLLNGRLQSIMPPM | |
| | | in cluster | | | | RGRRILGIGYTAPYLPESAE | |
| | | with | | | | FAVSGRLLHPQTQRTTRPTR | |
| | | Hydroxyacyl | | | | SQTRNISWADCIVSSGRLPF | |
| | | glutathione | | | | DDLSMNAVLVVHGLEFTRFA | |
| | | hydrolase | | | | PDFLRAIWRTLSDDGILTLV | |
| | | | | | | VPNRSGYWAHTDATPFGHGI | |
| | | | | | | PYSSGQLTRLLDQALFRIEH | |
| | | | | | | HSTALMTPPAALSVTHGRLM | |
| | | | | | | ERAGRTLRLPCGGVHVVTAR | |
| | | | | | | KNVYAGTPLIDEKLCVPLPR | |
| | | | | | | QVAEPA | |
| GO_ | GO_ | Hydroxyacyl | H | | Up | MPLDIKPIPVLSDNYAWLLT | 154 |
| 2765 | 2765 | glutathione | | | | AMEGQRAVVDPGEAGPIMDE | |
| | | hydrolase (EC | | | | IGEGRLDMILLTHHHADHTA | |
| | | 3.1.2.6) | | | | GTDALRERYGAKVYGPRQKR | |
| | | | | | | EWLPRLDHDVEDGDSFSLGS | |
| | | | | | | AQIRVLSTPGHAVGHVSYVV | |
| | | | | | | PGVPALFCGDVLFSLGCGRL | |
| | | | | | | LEGTAQELFDSLHRYDSLPD | |
| | | | | | | RTLVCAGHEYTRSNLAFALH | |
| | | | | | | VDPDNEALKARAAEVEQLLE | |
| | | | | | | AGRPTLPVSLGVERKTNPFL | |
| | | | | | | LAPDVATFARLRREKDTF | |
| GO_ | ftsX | Cell-division- | H | | Up | MSAPVSPGLRSGSLPLLVAL | 155 |
| 2772 | | associated, | | | | MTLLAGLSLAGLTGVQTLAE | |
| | | ABC- | | | | GWAGAARNATTIEIPSDTPQ | |
| | | transporter- | | | | LEDRTRALIQTLHKTPDITT | |
| | | like | | | | VRELSPQQVQTLLAPWLGQV | |
| | | signaling | | | | SDSGHLPGLSLPVVLIVAHT | |
| | | protein | | | | GTPDLGRVVHEALPEAVVEE | |
| | | FtsX | | | | DRRWGERLNGLGSSLVACAW | |
| | | | | | | LAVSLIAAIAVLSVGMTVRR | |
| | | | | | | SVMAQRKAVEIVHFLGAGDV | |
| | | | | | | TISSRIAGRAALLSLAGGLA | |
| | | | | | | GLFSLSPVITMLARKLAPFS | |
| | | | | | | HDAGSAALPATTWQTMLASW | |
| | | | | | | WNTLHVLPRLLLEELGALPL | |
| | | | | | | IAACLGWLTAQTVVLVWLRR | |
| | | | | | | LP | |
| GO_ | GO_ | hypothetical | H | | Up | MRIECPHCHAVFEVPEALAK | 156 |
| 2774 | 2774 | protein | | | | GVKRLRCANCGDSWELGAAA | |
| | | | | | | VSKSEEAPDGAVAAPEVFEV | |
| | | | | | | PEEGVAAAPAVADSPVSGTE | |
| | | | | | | GTFRATGAMASRSNARRSAV | |
| | | | | | | LHSRSAGDVQVPTDTAGPSM | |
| | | | | | | IGSTGAWIAAWGASLVLAGG | |
| | | | | | | GVAALWYCKGAGVFGFLPGA | |
| | | | | | | GHFS | |
| GO_ | GO_ | Translation | H | | Up | MTVLSADPGRIAERLPLLER | 157 |
| 2813 | 2813 | elongation | | | | RTQMVRSVRTFFEERGYLEV | |
| | | factor | | | | ETPFAVPVPGEEVHLRCFRT | |
| | | PLys34--(R)- | | | | ELERPDGSREARFLHTSPEF | |
| | | beta- | | | | AMKRIVAATGRPVFQMARVW | |
| | | lysine ligase | | | | RNGEASNTHAPEFTMLEWYR | |
| | | | | | | PGADLSSLMDETEAFLRALL | |
| | | | | | | PPVVHRGMDVIDLSLPFERL | |
| | | | | | | TMQAAFARYVGADLLGTAGN | |
| | | | | | | AEALAAQAHVGLRNGENWED | |
| | | | | | | LFFRLLLERIEPVIGRERPT | |
| | | | | | | FLTHWPAEQAALARRDPEDG | |
| | | | | | | RAALRFELYVGGLELANAFE | |
| | | | | | | ELTDPVEQRERFATDRKRRV | |
| | | | | | | ELSPDQDWGLDEDFLAALPD | |
| | | | | | | LPPCSGIALGFDRLVMLATG | |
| | | | | | | APRISDILWLA | |
| GO_ | GO_ | hypothetical | H | | Up | MGQVSIRLNGYVYNVGCQDG | 158 |
| 2819 | 2819 | protein | | | | EEAHLYDMARHVEGWLQRAR | |
| | | | | | | TLGGAASESKTLMMAALLMA | |
| | | | | | | DEIFELKRRQISPQAETQIQ | |
| | | | | | | QAEQLLRLEGARQERLARLA | |
| | | | | | | GQAELLAAELERAS | |
| GO_ | GO_ | hypothetical | H | | Up | MKPWRIGRLFRTSLPADHHI | 159 |
| 2828 | 2828 | protein | | | | RQGNAHNSDRNWAQAARAYQ | |
| | | | | | | AALAVDPGLAHIWIQLGHAL | |
| | | | | | | KEQGDLSQAEHAYRQATLLS | |
| | | | | | | PHDPDGWLQLGHLLSLAGNV | |
| | | | | | | RDSITALEEGQRISGDPLFA | |
| | | | | | | AQDIAALRERQKQPQRSWRQ | |
| | | | | | | PEWVTPDITGLWTSEGFCPA | |
| | | | | | | GMELFDPWAYWQINPEVRQM | |
| | | | | | | FDIPVALDLVQHFCTFGVSI | |
| | | | | | | CLPFSLIESFDPDFYRRFCL | |
| | | | | | | NGIAFTDAGAYRHWLTTGIA | |
| | | | | | | QHVPANEKRWIQSLLGDRIT | |
| | | | | | | KLEDVDPLLSSAFRDENAAT | |
| | | | | | | HTQRTLVEGFISDLLTDPQR | |
| | | | | | | PVTPTPRNAPLLHAIACRGE | |
| | | | | | | KGTELHQEGARRLREKIYLH | |
| | | | | | | VPTYRENTRALTRTMTTQGL | |
| | | | | | | DIAAHPLLKDLARHPDEPAE | |
| | | | | | | TLIALANCENRLGSLDAAVT | |
| | | | | | | TLRTATGKKPGRPDLRLCHD | |
| | | | | | | LQEDRNYHHAWNAALALART | |
| | | | | | | GQLEAGQRHLRAYLDSLPFM | |
| | | | | | | LPDHRPLRPRSGAVAIVGKL | |
| | | | | | | NLLQCRLYRVEQRRDHLLAA | |
| | | | | | | GYTVEIFDVDTDLDVFTAKI | |
| | | | | | | AAFESVIFYRLPAWPAVIRA | |
| | | | | | | IHLARSLGLTTFYDIDDPLF | |
| | | | | | | DADLYPEPFETYGGTISRET | |
| | | | | | | YYGLALGVPLFAKALSLCEY | |
| | | | | | | AIASTEPLAEQMRHHHIGEV | |
| | | | | | | FVQPNGLGEAHAIAMRRHGS | |
| | | | | | | QSPSPDQPVTIFYGSNTKAN | |
| | | | | | | RSEIVSVLEPALMRILKKHG | |
| | | | | | | QRVRLCIVGDLPEDSVLRNL | |
| | | | | | | RENITLLPPLPDVQAYWSLL | |
| | | | | | | SSADINLAILGQSPTTDTKS | |
| | | | | | | GIKWLEAAMFGIPSVLSDTA | |
| | | | | | | GYRDVARENETALFATDTDS | |
| | | | | | | WVRALDQLVTDPALRTRIGK | |
| | | | | | | AAYTHALTTYSATPLASHAK | |
| | | | | | | AFMERTAPPDTTARHRILGV | |
| | | | | | | NVFYPPQAIGGATRVFHDNL | |
| | | | | | | SDLSTPEDRRFLFEVFTSQV | |
| | | | | | | EPDSKKLRVYAQDGILVTSI | |
| | | | | | | APLDVDDKDRIAEDPNMVAQ | |
| | | | | | | FRKVVERFRPHLVHFHCIQR | |
| | | | | | | LTAGIIDVLLELDIPYCITL | |
| | | | | | | HDAWWISDRQFVIDELGQPR | |
| | | | | | | LYNYSSPLETLERCGAKAVA | |
| | | | | | | RMESLRDRLFGAKAVLAVSE | |
| | | | | | | AFAELYRTAGVHQVQTIENG | |
| | | | | | | VSVLTPRPRLREESGRIRLG | |
| | | | | | | FIGGLARHKGWDLIQIALRA | |
| | | | | | | GSFHNLELLAIDHAMSPGDE | |
| | | | | | | RTDVFGQTPVVFRGKMSQNE | |
| | | | | | | VADLYASIDVLLAPSIWPES | |
| | | | | | | FGLVTREATLCGCWVVASDR | |
| | | | | | | GAIGDTISDDINGFRIDVSS | |
| | | | | | | AADLRRVLTLIDESPARFRQ | |
| | | | | | | PAPELKISRTARDQAQDLGV | |
| | | | | | | LYEKLLQPGET | |
| GO_ | GO_ | hypothetical | H | | Up | MIFPFKSAPRLRDLARNADT | 160 |
| 2830 | 2830 | protein | | | | ARDAKQWPEAALAYRNLLTR | |
| | | | | | | YPDRVDMWIQYGHALKESGY | |
| | | | | | | LVDAELAYRQAIQRSPTQAE | |
| | | | | | | GYIQLGHALKLQNRREEAAA | |
| | | | | | | AYREALRHDPDATVATVELA | |
| | | | | | | ALGF | |
| GO_ | GO_ | L-lactate | H | | Up | MNHHGIAALHRRADRVLPRI | 161 |
| 2845 | 2845 | dehydrogenase | | | | FRDYVNGGSHSERTVRANRR | |
| | | | | | | AFDRWAVVPKCLVDVSECDL | |
| | | | | | | SGSFLGATHRLPFMFAPLGF | |
| | | | | | | GGLMYPDGEIRAARVAAASG | |
| | | | | | | LPMAVSTFAIQSLETLSRVP | |
| | | | | | | GVTLAAQIYVFRDRGITRDM | |
| | | | | | | LRRAESCGIRNIILTVDTPI | |
| | | | | | | TPLRLRDVRNGFRNLTRPSL | |
| | | | | | | RHVLSMAAHPRWTAGMLRNG | |
| | | | | | | MPKIGNLAPYGMGDNLMEQA | |
| | | | | | | RNAASQIDPTLTWKDLDWLR | |
| | | | | | | SVWPGQLAIKGIMDAGDALA | |
| | | | | | | CQKAGAQTVIVSNHGGRQMD | |
| | | | | | | PAPSSLSVLPDIVEALKGET | |
| | | | | | | DVILDGGVRWGGDVVTALAL | |
| | | | | | | GAKAVGIGRPWAWALAAGGE | |
| | | | | | | RGVRSLVDGLGGEIRDVLRL | |
| | | | | | | GGMVDLASLRAQGAAALRPV | |
| | | | | | | S | |
| GO_ | GO_ | hypothetical | H | | Up | MMMPRFFRCLPLALLVVLTA | 162 |
| 2905 | 2905 | protein | | | | CGNRYEYSRASFNGPLQCAP | |
| | | | | | | YARERTGLKLSGSAASWWGQ | |
| | | | | | | SVGRYAHTHTPRPGEVLVFR | |
| | | | | | | ATSRVPSGHVSIVRRQVSDR | |
| | | | | | | TILVDHANWEPGRIDRAVPV | |
| | | | | | | TDVSARNDWTLVRVWWAPVH | |
| | | | | | | SLGKRAYPTYGFISSHDSDD | |
| | | | | | | SS | |
| GO_ | GO_ | Paraquat- | H | | Up | MSDSRNNRGEPTVSPKEAPV | 163 |
| 2970 | 2970 | inducible | | | | RRTRFSLILLIPVVAILIAG | |
| | | protein B | | | | WLAWEHFATRGPVITITFET | |
| | | | | | | ADGLTPGQTQVKNKAVTLGT | |
| | | | | | | VQDITLSDDMKHVDVTVQMN | |
| | | | | | | ANSAHILTDHTRFWVVRPRI | |
| | | | | | | NGASITGLDTLFSGAYIALD | |
| | | | | | | PGSDDGHYQKFFKGLESPPG | |
| | | | | | | VRSDQPGETFWLVSPSLGSL | |
| | | | | | | GPGSPVFFRDLQVGEVLGYT | |
| | | | | | | MPPGGKGPIVIQAFVKEPYD | |
| | | | | | | HYLRTDSRFWNVSGVQVGLG | |
| | | | | | | AGGLKVQLKSLQALFSGGIA | |
| | | | | | | FGLPERRRNIDLPDAPANSV | |
| | | | | | | FKLYASEADADNARYHKRLR | |
| | | | | | | VVTYINSSVKGLINGSQVTM | |
| | | | | | | FGLQIGTVTDVRLLLEGPTK | |
| | | | | | | LPRVRVDMELEPERMLSNWD | |
| | | | | | | DRIENSKEPPVEKYLQAFVA | |
| | | | | | | DGMRASVQSASFLTGESMIA | |
| | | | | | | LQFVKNAPVTTLTYEGDVAV | |
| | | | | | | LPSQAGGMDGIMESVSTITD | |
| | | | | | | KIAAMPLTEIGGHVNDLLAH | |
| | | | | | | ADGRLNSPEVTQSLAALRDS | |
| | | | | | | LQNLSRLTKTANQNLPALMK | |
| | | | | | | GLQGTLANAQSVLGAYGGDT | |
| | | | | | | DFHRSLQNMITQLTQMSRSL | |
| | | | | | | RFLTDYLDHHPSALITGRRN | |
| GO_ | GO_ | Outer membrane | H | | Up | MIPGFLQSPYGPPSFGAPYG | 164 |
| 300 | 300 | low | | | | TTHALGDWWGAQPWLQKHGL | |
| | | permeability | | | | YVAIDDYESLSGNPIGGKRQ | |
| | | porin, | | | | SETDTGQTAVTLDVDFQRLL | |
| | | OprBfamily | | | | EMGTWSKNFWLHMLVLNGHG | |
| | | | | | | RNLSQIFGDNGNQVQQIYGA | |
| | | | | | | RGNVVAHLVWAYFEKSWLQN | |
| | | | | | | RIDWSVGWIPTGTFFNNSPW | |
| | | | | | | VCSFMNVWMCGNITPTKYLT | |
| | | | | | | GGRDWPSGNIGTVLRLMPTS | |
| | | | | | | HFYIMGGLFAVSPHSYNGGI | |
| | | | | | | SGWAWGQDGLGKLSTEAELG | |
| | | | | | | WIPEFGKDHLIGHYKVGAMY | |
| | | | | | | DNSKYDDLYDDRYGHAWIVS | |
| | | | | | | GLAPRKQSGQISAWVLADQM | |
| | | | | | | LLRHGEGATNGLILAGAYSY | |
| | | | | | | AQGQTSAMNHHLIAALMDTG | |
| | | | | | | HMWGRSLDSIGIAFQWANFS | |
| | | | | | | RSATLAQEAALTAGQPFQSS | |
| | | | | | | NFGTPYGIQGHENIYEFFYT | |
| | | | | | | YHVMTGMTLQPDFQYINHIG | |
| | | | | | | GTTVFKDAVVFSLAFNVSL | |
| GO_ | GO_ | hypothetical | H | | Up | MRALLFLAVLTGSGLALTDV | 165 |
| 3148 | 3148 | protein | | | | SAGAQELRRDGLSAHAVLTD | |
| | | | | | | EVSQSGVDHRMLECRTDPRL | |
| | | | | | | LHTVWDGRPSPHPEPHVCTG | |
| | | | | | | GANRLGAGYVRYLATSRMVK | |
| | | | | | | AHKPLRG | |
| GO_ | GO_ | hypothetical | H | | Up | MPNHPYFRATLMAALAVESA | 166 |
| 3172 | 3172 | protein | | | | TGLSACGPMGPGKLRNDQLE | |
| | | | | | | YSRALGDTQKHEMLLNIVRL | |
| | | | | | | RYADPPTFLDTTQVIAGYSV | |
| | | | | | | SKSISGGFYAYPATAVGNYL | |
| | | | | | | FGTGTMSLGESPTFTYQPVT | |
| | | | | | | GQQYAENVVRPISPTVIMPL | |
| | | | | | | SLGGLPIDTLLRLTAQSIDG | |
| | | | | | | LSNVRGLGAGPSGGGSVRFY | |
| | | | | | | LLLHDLRQLQIQGAMTIRIT | |
| | | | | | | SETPPPPDSKKNGGKSDSNG | |
| | | | | | | NGGSSTGTERSYLVLTSTSD | |
| | | | | | | SNLLAIQAEVRRLLHLDPGA | |
| | | | | | | EEAEIVYGPYPKHPGKQIAI | |
| | | | | | | LTRSMLAMLTQLAYEVEVPE | |
| | | | | | | DDIKSGRTPPTIGQVGIENR | |
| | | | | | | PEVVIHSSREEPDSRYAAVS | |
| | | | | | | YNNTWFWISDRDFQSKLAFT | |
| | | | | | | MVQVLAALAATNHTAGAVVT | |
| | | | | | | IPAG | |
| GO_ | | hypothetical | H | | Up | MKIAFIYIAEPYQCYHTASV | 167 |
| 3238GO_ | | protein | | | | ASALAAIPGHDVVEYYSFPE | |
| 3238 | | | | | | TVEHLSRIRQALDVPALPLK | |
| | | | | | | AFPKSLKARLLKRARRLDQE | |
| | | | | | | RLVVLRENIAELNRYDAVVA | |
| | | | | | | TEYTAGVLKEMGLSSPKLIL | |
| | | | | | | LMHGAGDRYVNDEHLVREFD | |
| | | | | | | LTLVPGPKVEGYFQDRGLLR | |
| | | | | | | PETTRVVGYPKFDVFEAVQR | |
| | | | | | | EKTISFANGRPFALYNPHYQ | |
| | | | | | | RKLTSASGWMMPLIRGFKAQ | |
| | | | | | | SDYNLVVAPHIKTFHRGFGI | |
| | | | | | | RERQLKRQRSPEVMVDTGSS | |
| | | | | | | AMLDMTYTSQAALYIGDVSS | |
| | | | | | | QVYEFLGIPRPCVFLNPRKL | |
| | | | | | | PWQDDPYFLHWTLGEVVEDL | |
| | | | | | | DDLMPAIARAQERHALYRPA | |
| | | | | | | QEKLFRETFGEPLLGASQRA | |
| | | | | | | ADAIAQFMSVA | |
| GO_ | GO_ | Putative | H | | Up | MTTKPAGTPLSVPDDATVAS | 168 |
| 3262 | 3262 | hemolysin | | | | VSTPASTPAPHTLASSEETL | |
| | | | | | | RQMETLSTLSLNREGGFQEL | |
| | | | | | | RGGTLGVRIAETAEERDAAQ | |
| | | | | | | ALRYRVFFEELGARPDERAF | |
| | | | | | | RTKRDVDEFDEAADHLLVID | |
| | | | | | | HAKGPGAAGVVGTYRLLRSD | |
| | | | | | | AAEKIGRFYTSSEYDISTLT | |
| | | | | | | EFPGRLLEVGRSCVAKEYRG | |
| | | | | | | RSAMQLLWRGIASYIFLHRI | |
| | | | | | | DVLFGCGSLPGTDPDALADQ | |
| | | | | | | LTYMHHNHLAPPALRIRALP | |
| | | | | | | DRYVEMQRTDPHVLDYRACL | |
| | | | | | | NKLPPLIKGYLRLGGYVGDG | |
| | | | | | | AVVDEQFNTTDVAVLVKSEL | |
| | | | | | | LADKYYRHYERRLRDALD | |
| GO_ | GO_ | Acetyltransferase | H | | Up | MLGREIRTARLVLTPVNWPD | 169 |
| 3278 | 3278 | | | | | LEDMVALKGDAGAFARMLGG | |
| | | | | | | VRNRTTTEEEMAEDVSFWAR | |
| | | | | | | RGVGIFAIRENGRFVGITGV | |
| | | | | | | HERPDGRGLGLRFALFPWAA | |
| | | | | | | GRGIAREAAAAALRYVLDCG | |
| | | | | | | EKRIVAVAREDNLASRTVLG | |
| | | | | | | SLGLHHTQTFDRNGDTMLLY | |
| | | | | | | EITAD | |
| GO_ | GO_ | Biotin carboxyl | H | | Up | MIPDLKILDALMARMQALGI | 170 |
| 350 | 350 | carrier | | | | TELDYSRDGEHIRLVRDAQD | |
| | | protein of | | | | SSPQPTSPAPAAAASTLPVF | |
| | | acetyl-CoA | | | | ETASTPPKAETTIDAPMHGQ | |
| | | carboxylase | | | | FYASPTPDAPPFVKPGDIVA | |
| | | | | | | EGQPLYILEVMKTLSRIEAE | |
| | | | | | | FPCRIVAVLAANADAVSPGT | |
| | | | | | | PLFTVEPLDA | |
| GO_ | GO_ | DNA polymerase I | H | | Up | MPPEKPDLGKADLEKPHLVL | 171 |
| 373 | 373 | (EC 2.7.7.7) | | | | IDGSGFIFRAFHALPPMSSP | |
| | | | | | | QGVPVNAVYGFTNMLARLLR | |
| | | | | | | DHVGTHLAVIFDAGRTTFRN | |
| | | | | | | EIYPQYKAHRPEAPEDLRPQ | |
| | | | | | | FGLIRDATAAFNVPSIELAG | |
| | | | | | | WEADDLLAAYAKAAVEAGGC | |
| | | | | | | CTIISSDKDLMQLVRPGVEL | |
| | | | | | | MDPMKQKPIREAEVEAKFGV | |
| | | | | | | RPDQVVDVQALMGDSTDNVP | |
| | | | | | | GVPGIGPKGAAQLVNEYGTL | |
| | | | | | | EQILEAAPGMKASKRRDNLI | |
| | | | | | | EHADAARMSRRLVLLDDNAP | |
| | | | | | | MPQPISELGCREPVRETLRD | |
| | | | | | | WLEEMGFHSTIQRMGLGLAA | |
| | | | | | | KPRPFTRQIVRPEDKAAARD | |
| | | | | | | EVAAVTIPDAPYGPYETVTD | |
| | | | | | | MDALDRWIADARTAGVVAVD | |
| | | | | | | TETDSLNARQANMVGLSLSV | |
| | | | | | | APGKACYVPFLHETIRDLLE | |
| | | | | | | EDSTGEAFVRQLDRTEALER | |
| | | | | | | LKPLLQDASVLKVFQNAKYD | |
| | | | | | | LTVFRGAGIPEISPIDDTML | |
| | | | | | | ISYAQSAGEHGQGMDELSEL | |
| | | | | | | HLGHTPVTYDSVTGTGRKRI | |
| | | | | | | PFAQVAIDTATAYAAEDADV | |
| | | | | | | TLRLWQVLRPQLRTRHALAL | |
| | | | | | | YEEIERPLIQILTDMEEVGI | |
| | | | | | | KVDATELRRMSADFAERMAT | |
| | | | | | | IEQEIHEQVGRSFNVGSPKQ | |
| | | | | | | LGEILFDEMGLPGGKRTKSG | |
| | | | | | | SWGTDSGVLESLAEQGHELP | |
| | | | | | | QKILSWRQLAKLKSTYADAL | |
| | | | | | | VQQMDQDTQRVHTSFQMAIT | |
| | | | | | | TTGRLSSNEPNLQNIPIRTE | |
| | | | | | | EGARIRKAFVAAPGCVLLSA | |
| | | | | | | DYSQIELRLLAHVAKIEPLL | |
| | | | | | | EAFRLGQDIHARTASEVFGI | |
| | | | | | | PLEGMDPLTRRRAKAINFGI | |
| | | | | | | IYGISAFGLAQQLQISPGEA | |
| | | | | | | RSYIDAYFARYPGIRAYMER | |
| | | | | | | TKEEAKRHGYVTTPFGRRCY | |
| | | | | | | VPGITEKNGARRAYAERQAI | |
| | | | | | | NAPLQGGAADIIKRAMVHLA | |
| | | | | | | RRLPAMGLKAKMVLQVHDEL | |
| | | | | | | LFEVEEQDAKALADFVRTEM | |
| | | | | | | EGAARLDVALEVETGIGPSW | |
| | | | | | | ADAH | |
| GO_ | GO_ | ABC transporter, | H | | Up | MKRGAALLAASLLLGAGAFP | 172 |
| 375 | 375 | substrate-binding | | | | ALAQEQTPPDWNGITLGSPH | |
| | | protein | | | | RGGTLHLTADGPGGTLDPQI | |
| | | (cluster 5, | | | | NYGTQYMQVFVNMYDPLLTF | |
| | | nickel/ | | | | RLARGKAGLEVVPDLADAMP | |
| | | peptides/opines) | | | | QISPDGLTWRLHLRSGLHFS | |
| | | | | | | DGAPVRVEDVVASFRRIYRA | |
| | | | | | | GSPTAASFYGGIAGAGECLE | |
| | | | | | | TPDRCTLSGVEGHPETGEIV | |
| | | | | | | FHLTKPDGEFLYKLAFPHAV | |
| | | | | | | ILPASTPVHDMGGTTVPGTG | |
| | | | | | | PYRITQYDPGHGMVLERNPY | |
| | | | | | | FHVWNPQAQTDGFVDRIEYD | |
| | | | | | | FGLSDEAQVTAVEQGRYDWM | |
| | | | | | | LDAKPADRLGELGANYTSQV | |
| | | | | | | HIEPLLGLYYLAMNTHEKPF | |
| | | | | | | TDVRVRRAVSMAVNRHAMTI | |
| | | | | | | LFGGSAISEPLCQMVPHGIP | |
| | | | | | | GADLGLDCPQDMEGARRLIH | |
| | | | | | | EADADGASVTLVVPNRAMEL | |
| | | | | | | GMGTYLRNALQSAGLNVQLR | |
| | | | | | | PITAGLAESYEQNTANHVQI | |
| | | | | | | ALSYWFADYPSASTFLDDLF | |
| | | | | | | GCDNYHPNSAVSPNYTGFCD | |
| | | | | | | QHVQSLFDQAKAQTDPAKAA | |
| | | | | | | PIWQEAGHVIMEQMPGAPMI | |
| | | | | | | QMRTVDFVSKRLGNYYATLL | |
| | | | | | | SHMLLSHVWVQ | |
| GO_ | GO_ | N-acetylmuramoy1- | H | | Up | MIAPSFTAGHWGQGMLTRRT | 173 |
| 382 | 382 | L-alanine | | | | LVSGLSGLPLLSPVAAFGRH | |
| | | amidase | | | | PLHKKLPAPAVHRGAVPPKP | |
| | | (EC 3.5.1.28) | | | | LVMLDPGHGGKDPGAIGISG | |
| | | | | | | TYEKHIAEAAASELSRQLLA | |
| | | | | | | SGQYRVAMTRSEDRFIPLEG | |
| | | | | | | RVELAQRHQAHLFISMHADA | |
| | | | | | | LHDRDVRGASVYTLSSGASD | |
| | | | | | | AQTASLARTENSADRFAGPA | |
| | | | | | | FHGMSPDVQQILASLVSEET | |
| | | | | | | RRGSAHMAASVVNSFRNRIG | |
| | | | | | | LLTHPSRHAAFVVLKSSEIP | |
| | | | | | | SVLVEMGFMSNRLDEAALRQ | |
| | | | | | | AVHRTQVASAMKTAIDRYFA | |
| | | | | | | THAGVMTG | |
| GO_ | GO_ | Outer membrane | H | | Up | MRLRTALLAMTSMVAAPSLA | 174 |
| 441 | 441 | protein | | | | MASTITGPYVNIGGGYNLVQ | |
| | | | | | | QQHGSFSPTTQADGTSSNAA | |
| | | | | | | SSSRYRHHDGFTGFGAFGWG | |
| | | | | | | FGNGLRVEVEGLYNYSQINH | |
| | | | | | | RRPTAVNGMTHGSDQAYGGL | |
| | | | | | | VNVLYDIDLANFGLNVPVTP | |
| | | | | | | FVGVGAGYLWQHYNPTTTNY | |
| | | | | | | VNGAVDRMGGTQGSFAYQGI | |
| | | | | | | VGAAYDIPNVPGLAVTTEYR | |
| | | | | | | FIGQDFVNGPYRSTAYNASG | |
| | | | | | | VHKGNVNFDQRFSHQFILGL | |
| | | | | | | RYAFDTAPPPPPPAPVVVPP | |
| | | | | | | APTPARTYLVFFDWDKSDLT | |
| | | | | | | GRAREIVAQAAQASTHVQTT | |
| | | | | | | RIEVNGYTDNSAAHPGPRGE | |
| | | | | | | KYNLGLSNRRASSVKAELIR | |
| | | | | | | DGVPAAAIDIHGYGESKPLV | |
| | | | | | | PTGPNTREPQNRRVEIILK | |
| GO_ | GO_ | ABC transporter, | H | | Up | MKTVFILLTVLAVGFPASHL | 175 |
| 541 | 541 | substrate-binding | | | | PGTARAADARDTLSIGLAIE | |
| | | protein | | | | PPGLDPTRGSSEAIGMVTYG | |
| | | (cluster 5, | | | | NIYEGLMRLDEQGALTPLLA | |
| | | nickel/ | | | | QDWHISPDGLTYDFTLHDGV | |
| | | peptides/opines) | | | | RFHDGTPLTCDSVKFSLLRA | |
| | | | | | | GAADSTNPHRAIFSQITNIS | |
| | | | | | | CPDSQHVSIRLQHPYGSFLY | |
| | | | | | | QLAWNDAAILSPASVDQNIS | |
| | | | | | | HPVGTGPFMFGEWRRGDHLT | |
| | | | | | | LTRNPDYWGASPALRSVTFR | |
| | | | | | | FMPDPLSASNALLAGELDAY | |
| | | | | | | PSFPSREILSRFTGNTQLQV | |
| | | | | | | VRGSFPFKAILALNNARRPF | |
| | | | | | | SDIRVRQAIAQAIDRKALIQ | |
| | | | | | | AVADGDGTLLQSHIAPDDPD | |
| | | | | | | YVPLPDRYPYDPEHARALLK | |
| | | | | | | EAGVAPGMHLTLTFPPIGYA | |
| | | | | | | RDSSELIAAYLEQVGLIVTL | |
| | | | | | | QPVEWPTWLGQVYGQGQFDM | |
| | | | | | | TVIAHTEPHDIAIYDRTPVY | |
| | | | | | | FHYHSPVFHGLAEQYEATAD | |
| | | | | | | TVRRHQLSVQMQEQLAQDEP | |
| | | | | | | NVFLFAIPRETVMNRRLKGL | |
| | | | | | | WTNQPIAGCPVAGVSWAP | |
| GO_ | GO_ | ABC transporter, | H | | Up | MSSLLHVRNLGVQSPDRPIL | 176 |
| 544 | 544 | ATP-binding | | | | HDVSFTLEPGQILAVTGESG | |
| | | protein | | | | SGKSTLALSLMGLLPPGFQA | |
| | | (cluster 5, | | | | HGSIRLEDTELSTLSEQDWC | |
| | | nickel/ | | | | RIRGKRLGMVFQEPMTALNP | |
| | | peptides/opines) | | | | TRRIGTQIGDTFRLHTTLSR | |
| | | | | | | HEIDTEMRMLLEQVGLSEAG | |
| | | | | | | VSERAYPHQLSGGQRQRVLL | |
| | | | | | | AMALACQPELLIADEFTTPL | |
| | | | | | | DARTQATMMALVTRRCETQG | |
| | | | | | | MAVLMISHDLGLVRHHADHV | |
| | | | | | | LVMKDGACVEQGATASVFDA | |
| | | | | | | PRHPYTQALLAMSLHGAART | |
| | | | | | | PLTPLPIFTAPS | |
| GO_ | GO_ | 5- | H | | Up | MKTLLPTSTAGSLPKPSWLA | 177 |
| 584 | 584 | methyltetra | | | | KPETLWSPWKLQGEELVEGK | |
| | | hydropteroyl | | | | QDALRLTLDDQDRAGIDIVS | |
| | | triglutamate-- | | | | DGEQTRQHFVTTFIEHLGGV | |
| | | homocysteine | | | | DFEKRQTVKIRNRYDASVPS | |
| | | methyltransferase | | | | VVGAVTREKPVFVEDAKYLR | |
| | | (EC 2.1.1.14) | | | | TLTKKPIKWALPGPMTMIDT | |
| | | | | | | LYDGHYKSREKLAWEFAKIL | |
| | | | | | | NQEARELEAAGVDIIQFDEP | |
| | | | | | | AFNVFFDEVNDWGIATLEKA | |
| | | | | | | VEGLKCETAVHICYGYGIKA | |
| | | | | | | NIDWKNALGAEWRQYEEIFP | |
| | | | | | | KLQKSSIDLISLECONSRVP | |
| | | | | | | MDLIELVRGKKVMVGAIDVA | |
| | | | | | | TNTIETPEDVASTLRKALKF | |
| | | | | | | VDADKLYPSTNCGMAPLSRR | |
| | | | | | | VARGKLNALGAGAEIVRKEL | |
| | | | | | | SA | |
| GO_ | GO_ | hypothetical | H | | Up | MSVEFTFNIKKIPFNEDYTP | 178 |
| 585 | 585 | protein | | | | SDSTRLTTNFANLARGEHRQ | |
| | | | | | | ENLRNVLCMIDNRFNSLAHW | |
| | | | | | | DNPNGDRYSVGVDIISAEMT | |
| | | | | | | IRSEGKNESFPLIEVLNTSI | |
| | | | | | | FDKKDDKRIPGIVGNNFSSY | |
| | | | | | | VRDYDFSVLLLKHNKDQSEF | |
| | | | | | | RTPDRFGDLHGNLFKCFINS | |
| | | | | | | ECYKTHFRKMPVICLSVSSN | |
| | | | | | | RTYYRTRNHHPVLGVEYEQR | |
| | | | | | | EFSLTDQYFGKMGMKVRYFM | |
| | | | | | | PENASAPLAFYFFGDLLFDY | |
| | | | | | | SNMELISTISTMESFQKIYR | |
| | | | | | | PEIYNSNSPAADCYQPSLKH | |
| | | | | | | QDHSVTRIIYDREERSQLAI | |
| | | | | | | AQGRFTEESFIKPYQDVLEQ | |
| | | | | | | WSAHYSV | |
| GO_ | GO_ | probable | H | | Up | MPRPVFPFRTTVRTLSLIRA | 179 |
| 634 | 634 | transglycosylase | | | | GAAFGLVGLLAACAGNNADM | |
| | | | | | | GGGSELPVSQEAANYRAHAK | |
| | | | | | | SYYAPPGPPSDPWGPYIQEA | |
| | | | | | | SNRFDVPEAWIRAVMQQESG | |
| | | | | | | GHLFDHNGNFITSVPGAMGL | |
| | | | | | | LQLMPPTYDDMRQQYGLGED | |
| | | | | | | PYDPHDNILAGTAYLRQMYD | |
| | | | | | | IYGSPGFLAAYNDGPGSLDR | |
| | | | | | | YLRRGRALPRETRRYVAAIG | |
| | | | | | | PHIAGITPHNRSAADLLVAQ | |
| | | | | | | HDPNSQVMLAQNTPSADIAP | |
| | | | | | | VTSASERQAVSAAWNHRETA | |
| | | | | | | DTSSDDSDSDTPAATPQTAP | |
| | | | | | | VQVASAAGSEAPASISAAWA | |
| | | | | | | ARGFTPTPARPAVRQASVPD | |
| | | | | | | DEVADNRVTAQEIPIGHHLQ | |
| | | | | | | PQPIMAVMPASRVQPRISLP | |
| | | | | | | AISTSSRAATGNWAIQVGAF | |
| | | | | | | ANAKQASIATSAAHSKGGVV | |
| | | | | | | VASARSQVESVKGGRSHLYR | |
| | | | | | | ARLTGLTHENAVAACRRLSH | |
| | | | | | | GSPCVVVPPGAY | |
| GO_ | GO_ | Queuine tRNA- | H | | Up | MSDHKTDHATKMTWTPEATC | 180 |
| 657 | 657 | ribosyltransferase | | | | GMARAGHLHTRHGTVPTPTF | |
| | | (EC 2.4.2.29) | | | | MPVGTVGTVKGMTMDAVRST | |
| | | | | | | GAGIVLGNTYHLMLRPTADR | |
| | | | | | | VQKLGGLHRMMDWPGPILTD | |
| | | | | | | SGGFQVMSLGALRKLDEDGV | |
| | | | | | | TFRSHIDGSKHRLTPEISTD | |
| | | | | | | IQFKLDATITMAFDECPALP | |
| | | | | | | ATPEVLRKSMEMSMRWAARS | |
| | | | | | | REAFVAREGYGQFGIVQGGT | |
| | | | | | | ERDLREYSIKALTDIGFEGY | |
| | | | | | | AIGGLAVGEGQELMFSTLDF | |
| | | | | | | TTPMLPQDKARYLMGVGTPD | |
| | | | | | | DLLGAVMRGVDMFDCVMPSR | |
| | | | | | | AGRTARAYTERGTINLRNAR | |
| | | | | | | FADDTRPLTPHDDTPVAGRY | |
| | | | | | | SRAYLHHLFRANEMLGPMLL | |
| | | | | | | TWHNLAYYQRLMRQIRAAIV | |
| | | | | | | DGTLDALAVKLRADWAKGDW | |
| | | | | | | TEDEWPMPDLTL | |
| GO_ | GO_ | Heparinase II/III | H | | Up | MTGSRWLQGLRLSLARLPFG | 181 |
| 68 | 68 | family protein | | | | GPASEGPVHAFRDPWKGDPD | |
| | | | | | | QGARLIGGHFRFDRQDYPLP | |
| | | | | | | NGNWERGPWPEPVREWLHGF | |
| | | | | | | SWLRDLRTLGSDRARLTARG | |
| | | | | | | LVSDWLAHPPTDPLVRDACV | |
| | | | | | | TGSRLAAWLSNHEFCLASAD | |
| | | | | | | PRLQQRLMERMLVEGRTIAA | |
| | | | | | | LLPLPPQGVRGLMAFRGLLA | |
| | | | | | | AAMAMPEQTGFMSRFLRYLP | |
| | | | | | | GELERLVLADGTVAERSPEA | |
| | | | | | | QFLVTRELAEMSVMFRTAHA | |
| | | | | | | SVPPFIDRALDRVCPVLRAM | |
| | | | | | | RHGDGGLAVFNGTNERHSAA | |
| | | | | | | VEDVLAQGSRQKLIAPAMPQ | |
| | | | | | | GKFTRLALGKSLLLVDSGPP | |
| | | | | | | APAGFDSMAHAGTLSFEFSH | |
| | | | | | | QRHRLFVNCGSAVVGAWRDA | |
| | | | | | | MRCSAAHTVLVADGLSSADF | |
| | | | | | | GPDGGMTRRPVTVSCDHQTD | |
| | | | | | | GAAHWLDLSHDGYHAPLGAK | |
| | | | | | | WTRRLYFGSDGEDLRGQEII | |
| | | | | | | DGERNIDFAIRFHIHPDVKV | |
| | | | | | | TQDDEDIILQVGGTIWRFRQ | |
| | | | | | | RDGVVRLENDVYLGRGKREI | |
| | | | | | | CQQIIITPRALPDAAPQEGE | |
| | | | | | | AAPADEKTDAGKAVRRTHQS | |
| | | | | | | VTWLLERIPE | |
| GO_ | GO_ | None (90 bp | H | | Up | MKHIRADKSNLSDIVTVAAG | 182 |
| 721 | 721 | upstream | | | | HPFRGKIEPIEGAETAVVQM | |
| | | from hypothetical | | | | RDTSPSGMDWTSCVRTEVAG | |
| | | protein GO_ | | | | RREPDWLRPGDILFPARGNV | |
| | | 721) | | | | SLAVLINESIGSLQAVAAPH | |
| | | | | | | FFLLRVSRSDVLPAYMAWWL | |
| | | | | | | NQEPAQRHLEQQAQSSTLVR | |
| | | | | | | NIARPVLEDTPVILPPLPRQ | |
| | | | | | | RQIVELANAMQREEDLLRRL | |
| | | | | | | RQTNQQIMTGLARDLLAG | |
| GO_ | GO_ | Two-component | H | | Up | MAADSLSRHLADRKTPWPHF | 183 |
| 78 | 78 | system sensor | | | | NQYLVAYLSYLLFYPVPWLL | |
| | | histidine | | | | GYHRPTLAGVLFSTAAMLVF | |
| | | kinase | | | | LLVYFAPYRKDRYYGYGEII | |
| | | | | | | LTDLIGYACAWTHGDWEVYC | |
| | | | | | | IFAAGMCARLPGKRQSVTMV | |
| | | | | | | ILLQVVLIISGHFRHKTTLE | |
| | | | | | | VIPGAFFSIITYMGTLVQWQ | |
| | | | | | | LGIRNFELREAQNEIRTLAT | |
| | | | | | | TAERERIARDLHDLLGHSLT | |
| | | | | | | VISVKAELAERLFTSDTSRA | |
| | | | | | | RHEVTEISQIARTSLREVRE | |
| | | | | | | AVSGMNGASLQRELDRARKA | |
| | | | | | | LNTAGITLVLNGPGPSTDQP | |
| | | | | | | QNSVLALALREAVTNVIRHS | |
| | | | | | | DARTCTLTFQHTAEGHIHTF | |
| | | | | | | TLEDDGPLQTTQSAPAIIEG | |
| | | | | | | NGLRGMRARLAASGGTLTVS | |
| | | | | | | PRPQGFKLTATTLP | |
| GO_ | hfq | RNA-binding | H | | Up | MTSEPSSSAGSRAVQEVFLD | 184 |
| 175 | | protein | | | | HLRRTEASVTVFLVNGVKLQ | |
| | | Hfq | | | | GIVAQSDAHTLLLRRDGHVQ | |
| | | | | | | LVYKHAVSTIMPVAAMSHFV | |
| | | | | | | EEEL | |
| GO_ | hisH | Imidazole | H | | Up | MRVVVIDYNGGNLASAAQAA | 185 |
| 159 | | glycerol | | | | RKAAIRKGIEADVVISRDAS | |
| | | phosphate | | | | DILNADRLILPGQGAFADCA | |
| | | synthaseamido | | | | QGLGPELRNMLETATANGTP | |
| | | transferase | | | | FLGICVGMQLMCEYGLEHGR | |
| | | subunit (EC | | | | TEGLGWISGNIRRMDEAANA | |
| | | 2.4.2. ) | | | | GLRLPHMGWNTLDFTPGAHL | |
| | | | | | | LTDGLTPGNHGYFVHSYALH | |
| | | | | | | DGTDSDLVATAQYGTQVPAI | |
| | | | | | | VARGNRCGTQFHVEKSQDVG | |
| | | | | | | LTILGNFLRWTS | |
| GO_ | hpnA | Hopanoid- | H | | Up | MNDVTLVTGATGFVGSAVAR | 186 |
| 2110 | | associated | | | | VLEERGHRLRLLVRPTSDRS | |
| | | sugar epimerase | | | | NIAELNAELAVGDLSDPDTL | |
| | | HpnA | | | | APALKGVKILFHVAADYRLW | |
| | | | | | | VPDPETMMKANVEGTRNLML | |
| | | | | | | AALEAGVEKIIYCSSVAALG | |
| | | | | | | LRSDGVPADETTPVSESQVI | |
| | | | | | | GIYKLSKYRAEQEVLRLVRE | |
| | | | | | | KNLPAIIVNPSTPVGPRDIK | |
| | | | | | | PTPTGQMILDCASGNMPAYV | |
| | | | | | | ETGLNIVHVDDVAEGHALAL | |
| | | | | | | ERGKIGEKYILGGENIMLGD | |
| | | | | | | LFRMVSQIAGVKPPSVKLKQ | |
| | | | | | | SWLYPVALVSEWLARGFGIE | |
| | | | | | | PRVTRETLAMSKKLMFFSSD | |
| | | | | | | KAKKELGYAPRPARDAVTDA | |
| | | | | | | IVWFRQHGRMK | |
| GO_ | hpnN | Hopanoid- | H | | Up | MSGWGRETLPVLLRVGPMFS | 187 |
| 2346 | | associated | | | | DLTGRLNAVCARRAPLVLAL | |
| | | RND transporter, | | | | FALLCAGCVALSVTRISVTT | |
| | | HpnN | | | | DTSKMFANTLPWKKRSMELT | |
| | | | | | | RLFPQDSNQLVAIIDSRIPE | |
| | | | | | | QGRMAARQLAATLSQDHTHF | |
| | | | | | | KTVSLPGDNAFYNSHGFLFL | |
| | | | | | | DTKDLEPLLDSIVSAQPFLG | |
| | | | | | | TLAADPSARGLFGALGLIGE | |
| | | | | | | GIKAGQGIPSGFDGALDGFA | |
| | | | | | | NSLTAAANGHPQDMSWQNLL | |
| | | | | | | IGKLAELGSQYEFVVTQPKL | |
| | | | | | | DYSSFQPGEGATTAMRQAIN | |
| | | | | | | NLEFVKTKQASGIITGEVKL | |
| | | | | | | SDEEFSTVAHGMVLGLVISL | |
| | | | | | | VLVAVWLILAVHSPRVIIPI | |
| | | | | | | LLTLISGLLLTTGFAALAVG | |
| | | | | | | ELNLISVAFAILFVGIAVDF | |
| | | | | | | AIQYSVRLRGQRNPDGSHPS | |
| | | | | | | LHDAIILTGQESGAQILVAA | |
| | | | | | | LATAAGFLAFYPTSFIGVAQ | |
| | | | | | | LGLIAGFGMLIAFFCTMTLL | |
| | | | | | | PALLSIFHAKLGNGTPGFAF | |
| | | | | | | MAPADAFLRHKRHKVVGVFA | |
| | | | | | | LLGIVGLALMPLLKFDADPL | |
| | | | | | | HTKDPNTEGMRALHLLEANP | |
| | | | | | | LTTPYSAQVLTPNLTEAARQ | |
| | | | | | | AAAFSKLPSVHDVLWLGALV | |
| | | | | | | PDDQKTKLAMIEDTASILLP | |
| | | | | | | TITIANPAPAPDAAAIRAAA | |
| | | | | | | VTAAQKLDAVKDQLPAPLEK | |
| | | | | | | IRQALHTLSTAQDSTLLQAS | |
| | | | | | | TSLTRFLPDELSMLRTALQP | |
| | | | | | | TPVTMESIPQDVRQDYVLPD | |
| | | | | | | GRARLTIHPKGQMSETPVLH | |
| | | | | | | RFVRELRSVNPDVAGPAMEI | |
| | | | | | | TESANTIVHAFTVAAICALI | |
| | | | | | | MIAIILLVVLRRLLDAALVM | |
| | | | | | | APLLMSALLTVILVVTVPET | |
| | | | | | | LNYANIIALPLLLGVGVSFN | |
| | | | | | | IYFVMNWREGVKGPLTSPTA | |
| | | | | | | RAVLFSALTTATAFGSLARS | |
| | | | | | | GHPGTASMGRLLLMSLGCTL | |
| | | | | | | LCTMVFVPALLPKRPIDEA | |
| GO_ | lexA | SOS-response | H | | Up | MAFILHLVFRPASAEAHGSA | 188 |
| 2087 | | repressor and | | | | CMLTRKQHOLLLYIDDHLRR | |
| | | protease LexA | | | | TGYSPSFDEMKDALELRSKS | |
| | | (EC 3.4.21.88) | | | | GIHRLISALEERGFLRRHHH | |
| | | | | | | RARALEVLRLPHMGTEAPVA | |
| | | | | | | TGTGTAFVPAVLNQGQTGLQ | |
| | | | | | | GAFSEDSVANDRQTVSIPLY | |
| | | | | | | GRIAAGLPIEAMQDDSDRID | |
| | | | | | | VPVSLLGTGEHYALTVAGDS | |
| | | | | | | MIEAGILDGDIAIIRRRETA | |
| | | | | | | ENGQIIVALIDEQEVTLKKL | |
| | | | | | | RRRGSMIALEAANRDYETRI | |
| | | | | | | FPAERVHIQGRLVALFRQY | |
| GO_ | 1ptG | Lipopolysaccharide | H | | Up | MNDSTHAMPRHVLIKALNRA | 189 |
| 1655 | | export | | | | LLGRFLLCGAVLVSLLEILA | |
| | | system | | | | LLEKTTPILNRHLGVRGILT | |
| | | permease | | | | FAFLHLPALSIDILPLAFMV | |
| | | proteinLptG | | | | GALFLLTQMTLSSEISALRA | |
| | | | | | | AGLSTPALYRLLLPAVLIAG | |
| | | | | | | IGGTCAQYWLVPACENALTT | |
| | | | | | | WWNRTDPLAGQDGQPEDNIL | |
| | | | | | | WFRAGPTLVRIGQIAQGGTF | |
| | | | | | | LRDVTIYHRDSTGLLTGTEH | |
| | | | | | | TNVLTYRDGQWHPDGAQDLS | |
| | | | | | | LSDDKSYVNVTKGDSTFVIP | |
| | | | | | | ATPSVIMTLSQNGATVTPGQ | |
| | | | | | | VSAILHKGAPASLPRATYRM | |
| | | | | | | ALFSGMILPVEIAVMLLLTL | |
| | | | | | | PVIYIPPRAGLRNPLPVYVL | |
| | | | | | | AAGMGFVILQGMISALGNAG | |
| | | | | | | TLPAPLAVSVGPLLGTLLGL | |
| | | | | | | TWLLRMEER | |
| GO_ | LuxR | Two-component | H | | Up | MRILLVEDDPTVRAFVLKGL | 190 |
| 3200 | | transcriptional | | | | REAGHVVDEADNGKDGLFLA | |
| | | response | | | | VSENYDVVILDRMLPGGIDG | |
| | | regulator, LuxR | | | | LRILETLRGQKNATPVLLLS | |
| | | family | | | | ALADVDERVAGLKAGGDDYM | |
| | | | | | | TKPFAFSELLARVEALGRRG | |
| | | | | | | RPESAPQTRLVVGDLEMDLL | |
| | | | | | | SRTVKRGGEKIDLQPREFRL | |
| | | | | | | LEFLIRHAGQVVTRTMLLER | |
| | | | | | | VWDYHFDPQTNVIDVHVSRL | |
| | | | | | | RQKVDKPFDKPMIHTIRNAG | |
| | | | | | | YILRAD | |
| GO_ | metR | Transcriptional | H | | Up | MSVLQRNHLMIIQEVAREGS | 191 |
| 581 | | activator MetR | | | | LTAASARLNLTQPALSHAVR | |
| | | | | | | KIEMQLGVKIWRREGRSLIL | |
| | | | | | | TQAGQWLLSLANRLLPQFSL | |
| | | | | | | AEERLEQFANGERGTLRIGM | |
| | | | | | | ECHPCYQWLLNVVSPYLERW | |
| | | | | | | PKVDVDVRQKFQFGGIGAIL | |
| | | | | | | SNEIDILVTPDPLYKPGLNF | |
| | | | | | | TPVFDYELVLVVGSGHRLYG | |
| | | | | | | VDRVTPEQLADETLITYPVP | |
| | | | | | | SERLDIYTQFLQPAGIAPRQ | |
| | | | | | | QKQIETTDIMLVMVAHGRGV | |
| | | | | | | AALPRWLVDEYASRFDLHSV | |
| | | | | | | RLGENGIAKQIFLGRRETDA | |
| | | | | | | DVQYLTDFIAFAADPKD | |
| GO_ | metX | Homoserine O- | H | | Up | MRVDQRLIAEMIAPRARVLD | 192 |
| 1750 | | acetyltransferase | | | | VGSGDGTLIDYLYRTRSCDA | |
| | | (EC | | | | RGIEIDMQNVTQSVAHGLPV | |
| | | 2.3.1.31) | | | | MHGDADHDLADYPDDTFDYV | |
| | | | | | | VLQRTLQAVERPREVLRQML | |
| | | | | | | RIGRHAIVSFPNFGHWRLRL | |
| | | | | | | QLLTTGRMPMTPVWNTPWYS | |
| | | | | | | TPNIHPCTIRDFLLLCEEEG | |
| | | | | | | YVIQQWLAIDEDGARAPWRR | |
| | | | | | | SIRLANLFGEQAMFLLKRAG | |
| | | | | | | H | |
| GO_ | minC | Septum site- | H | | Up | MPDPVSATTSNTPMRIRARG | 193 |
| 2642 | | determining | | | | RSFLALVLSPEAPLPLWLEG | |
| | | protein | | | | LDYQIARSGGLFTGKPVILD | |
| | | MinC | | | | LGLLSETTPGLATLLDDIRR | |
| | | | | | | RGVRIIGIEGGSRHWSAVAH | |
| | | | | | | WDWPETLDGGRPAGEVEIPE | |
| | | | | | | DPSASAAGPVSGGGTLIIEQ | |
| | | | | | | TVRSGQSIQHMQGDVIILGS | |
| | | | | | | VSSGAEIVAAGSIHVYGTLR | |
| | | | | | | GRAIAGVGGQSQSRIFASRM | |
| | | | | | | LAELLALDGYYAVTEDIDPA | |
| | | | | | | ILGQAAQATLDEDRVRVLPL | |
| | | | | | | TT | |
| GO_ | minD | Septum site- | H | | Up | MAKVLVVTSGKGGVGKTTST | 194 |
| 2641 | | determining | | | | AALGAALAQSGQNVVVVDFD | |
| | | protein | | | | VGLRNLDLVMGAERRVVFDL | |
| | | MinD | | | | INVVQGDARLSQALIRDKRC | |
| | | | | | | ETLSILPASQTRDKDALTSE | |
| | | | | | | GVARVMDELREKFDWVICDS | |
| | | | | | | PAGIERGAQLAMYHADMAVI | |
| | | | | | | VTNPEVSSVRDSDRIIGLLD | |
| | | | | | | SKTKKAEQGEKVDKHLLLTR | |
| | | | | | | YDPARAARKEMLSVEDVLEI | |
| | | | | | | LSIPLLGIVPESEDVLKSSN | |
| | | | | | | VGAPVTLAAPTSLPARAYFE | |
| | | | | | | AARRLSGEKLEVSVPVEKRG | |
| | | | | | | FFDWLFKRDA | |
| GO_ | mlaD | Phospholipid ABC | H | | Up | MQSTLSGRGGAILASGLVLA | 195 |
| 1943 | | transporter | | | | IAGTFLVYGNALRKGPDFQG | |
| | | substrate- | | | | EILHAAFNSANGLHTGANVD | |
| | | bindingprotein | | | | LAGVPVGRVVSITLDPRTQM | |
| | | MlaD | | | | ADVAFTVDQRLHLPVDTAVG | |
| | | | | | | IGAPTMTADNALQIQPGHSR | |
| | | | | | | TTLSGEGKITDTRDQLSLEQ | |
| | | | | | | QVSNYIFGGGKLGQ | |
| GO_ | mlaE | Phospholipid ABC | H | | Up | MNAVLDPIAALGRAALGLIK | 196 |
| 2354 | | transporter | | | | QAGALALFALEALSHLVRPP | |
| | | permease | | | | FYWRIFFSSLIETGFFSLPV | |
| | | proteinMlaE | | | | VALTALFSGAVIALQSYVGF | |
| | | | | | | GQYHVQSAIAGIVVLAVTRE | |
| | | | | | | LGPVLAGLMVAGRVGAAMSA | |
| | | | | | | QIGTMRVTDQIDALTTLSTN | |
| | | | | | | PMKYLVTPRLLAGTLALPCL | |
| | | | | | | VLVADILGVMGGFTVSVAKL | |
| | | | | | | GFSPSTYITATLDSLKTMDV | |
| | | | | | | VVGLVKAAVFGFLIALLGCY | |
| | | | | | | NGYNSRGGAEGVGSATTAAV | |
| | | | | | | VGASILLLLFDYLLTDLFFS | |
| | | | | | | Q | |
| GO_ | mnmE | tRNA-5- | H | | Up | MTRSSLPDAPDNTPQVIFAL | 197 |
| 2236 | | carboxymethylamino | | | | ATGPSRAAIAIMRASGSGSD | |
| | | methy1-2- | | | | TILKALCNGRLPEPRRVSLR | |
| | | thiouridine(34) | | | | TLRHDGEVLDHAVALWLPGP | |
| | | synthesis protein | | | | NSYTGEDGFELHLHAGPAII | |
| | | MnmE | | | | ARVADALTDLGARPAEPGEF | |
| | | | | | | TRRAVQKGRLDLLQAEAIAD | |
| | | | | | | LVDAETESQRKQALRQADGA | |
| | | | | | | LSRLYDDWAQRLRLVLAHQE | |
| | | | | | | ALIDFPDEELPQDVEDGLVA | |
| | | | | | | ELSKLQIEMSAHLQDNRGEL | |
| | | | | | | MRQGLTVVIAGAPNVGKSSL | |
| | | | | | | LNALSGTDAAIVTHRAGTTR | |
| | | | | | | DAIALDWVLDGVRLRLIDTA | |
| | | | | | | GLRETEDEIEAEGIRRALFH | |
| | | | | | | VKQADVVLHLIGPNESLESL | |
| | | | | | | SGQEIPVRTKIDIAPTPPGM | |
| | | | | | | LGISTQSGEGLAALRQVLSE | |
| | | | | | | RVAELMAGSAAPPLTRARHR | |
| | | | | | | AGIQEAATHLERARTATWPE | |
| | | | | | | LRGEELRLSMLALGRLTGRV | |
| | | | | | | DVESLLDAIFGQFCIGK | |
| GO_ | mnmG | tRNA-5- | H | | Up | MVIGGGHAGCEAAAAAARFG | 198 |
| 2237 | | carboxymethylamino | | | | ARTLLLTHRLETIGAMSCNP | |
| | | methyl-2- | | | | AIGGIGKGHLVREIDALDGL | |
| | | thiouridine(34) | | | | MGKAADRAGIHFKLLNRSKG | |
| | | synthesis | | | | PAVHGPRAQADRSLYRAAIQ | |
| | | protein | | | | DLLAATLNLTILEGAAGDLI | |
| | | MnmG | | | | EENGRITGVICEDGREFRCG | |
| | | | | | | AVVLTTGTFLRGVIHVGHTQ | |
| | | | | | | TEAGRIGEAPAKRLGERLYA | |
| | | | | | | LGLQMGRLKTGTPPRLAKNS | |
| | | | | | | IDWENLPADPGDAEPEAFSP | |
| | | | | | | MTAAITNPQVVCRISHTTAE | |
| | | | | | | THRIINENLHRSAMYGGAIA | |
| | | | | | | GRGPRYCPSIEDKVVRFAER | |
| | | | | | | TSHQVFLEPEALPGNPGGDL | |
| | | | | | | VYPNGISTSLPADVQAAMIA | |
| | | | | | | TMPGLEKARIVTAGYAVEYD | |
| | | | | | | YVDPRELLPSLQLRRLPGLY | |
| | | | | | | LAGQINGTTGYEEAGAQGLL | |
| | | | | | | AGLNAARATAGNEALTLDRS | |
| | | | | | | DAYLGVMIDDLTLHGISEPY | |
| | | | | | | RMFTSRAEYRLTLRADNADL | |
| | | | | | | RLTPKGIAAGCVLSERAAAF | |
| | | | | | | TAQKAELDTAMTRAAETTFL | |
| | | | | | | PQTLRDVGFEVSLDGRRRTV | |
| | | | | | | LDVLASNGDHTKLDTLAPWF | |
| | | | | | | AELPLRVRRHVETEARYGGY | |
| | | | | | | LHRQDREIRQLASESAIALP | |
| | | | | | | ADLDYSAIGGLSSEMRERFS | |
| | | | | | | QARPTSFAAAQRVRGVTPAA | |
| | | | | | | LVALLAHVRTLS | |
| GO_ | mntR | Mn-dependent | H | | Up | MERKRRLRDIAPKETLPDVE | 199 |
| 1674 | | transcriptional | | | | THSEGFRANREARRNVLVED | |
| | | regulator MntR | | | | YVELISDLLSEGQEARQVDI | |
| | | | | | | AGRLGVSQPTVAKMLARLAT | |
| | | | | | | EGYVTQKPYRGVFLTPAGQD | |
| | | | | | | MADRARHRHRIVEAFLLALG | |
| | | | | | | VSEENARVDAEGVEHYVGSE | |
| | | | | | | TLTLFEKALRGNLKQFMQAL | |
| | | | | | | PDA″ | |
| GO_ | mrdA | Peptidoglycan | H | | Up | MRSGRGVFTRRALLVMAVQA | 200 |
| 390 | | D,D- | | | | GVLGVLGRRLYTLQVVDGGH | |
| | | transpeptidase | | | | LRQLAERNRTSKRLLAPARG | |
| | | MrdA | | | | TIHDRFGVALADNKVSWRAL | |
| | | (EC 3.4.16.4) | | | | LMPEETTDIPAVIERFSQIV | |
| | | | | | | PLDEHDRARIERDLRHVHKY | |
| | | | | | | VPVTLHEFLSWDDMARIELN | |
| | | | | | | APSLPGVLVDVGSTRLYPFR | |
| | | | | | | DLTAHIVGYVAPPNEEDVAK | |
| | | | | | | DTTLSLPGMRVGRAGIEQTQ | |
| | | | | | | EAVLRGEPGSVEMEVNAVGR | |
| | | | | | | VIGEIDRVEGQQGEDVRLTL | |
| | | | | | | DSVLQQQVLNRLEDRVASAV | |
| | | | | | | VMDCRNGEVMAMVSTPSFDP | |
| | | | | | | SLFDSGVSHAQWNEWANDPR | |
| | | | | | | TPLVDKAVSGLYPPGSTFKP | |
| | | | | | | AVALAALKSGSVTAQDRFNC | |
| | | | | | | PGYYDLGGVRFHCWNRWGHG | |
| | | | | | | LINMREGLKYSCDVYFYEVA | |
| | | | | | | RRCGMDPIQAVGNAMGLGVK | |
| | | | | | | LGIELPHVRSGVIPTPEWRQ | |
| | | | | | | KHGFHWNGGDTVNAGIGQGF | |
| | | | | | | VQVTPLALATYVSRIASGRD | |
| | | | | | | VQPHLLRATNDQMSAMASVD | |
| | | | | | | DVAKVDLPPEYLDVVRGGMF | |
| | | | | | | AVVNDPHGTAPKARLDLPGI | |
| | | | | | | QMAGKTGSAQVRRVSRALRE | |
| | | | | | | SGHFNSMNLPWEYRPHALFI | |
| | | | | | | CFAPYDNPKYAVSVVVEHGN | |
| | | | | | | AGADEAAPLAKLIMTDTLLR | |
| | | | | | | DPASDVRPPAPSVAQTPSPV | |
| | | | | | | ADGTAPAPTVPVLPDPAPAA | |
| | | | | | | PSEQTDPGAAQ | |
| GO_ | mreB | Rod shape- | H | | Up | MFSRLLGLMSADMAIDLGTA | 201 |
| 387 | | determining | | | | NTLVYVKGRGIVLDEPSVVA | |
| | | protein | | | | IAEVRGKKQVLAVGNEAKQM | |
| | | MreB | | | | VGRTPGNITAIRPLRDGVIA | |
| | | | | | | DFEVAEEMIKHFIRKVHNRR | |
| | | | | | | AFASPQIIICVPSGATAVER | |
| | | | | | | RAIQESAESAGARKVMLIEE | |
| | | | | | | PMAAAIGAGLPVTEPSGSMI | |
| | | | | | | VDIGGGTTEVAVISLGGIVY | |
| | | | | | | ARSARVGGDKMDEAIISYIR | |
| | | | | | | KTYNLLVGESSAERIKIELG | |
| | | | | | | SAMMPDDPANPDGPLTEIKG | |
| | | | | | | RDLINGVPREVIVSQAQIAE | |
| | | | | | | SLAEPVMQIVDAVTTALENT | |
| | | | | | | PPELAADIVDKGIVLSGGGA | |
| | | | | | | LLYRLDEVLRLYTGLPVTVA | |
| | | | | | | ENALSCVALGTGRALEEMRR | |
| | | | | | | LRSVLSSMY | |
| GO_ | ntrY | Nitrogen | H | | Up | MRFPALRRLFARLTSANGAV | 202 |
| 173 | | regulation | | | | LLTVMALVLAFATFVVLSGG | |
| | | protein NtrY | | | | MSLAHRPQVQAIVFLLDFIM | |
| | | (EC 2.7.3. ) | | | | LMLIAAAAVVQIGRMLAERR | |
| | | | | | | LGLAGARLHVRLITLFGIVA | |
| | | | | | | VAPTIVVGAVATLFFHYGVE | |
| | | | | | | IWFSNRVNDALNEARSVAVG | |
| | | | | | | YLQEHNDNARTEAFALANTL | |
| | | | | | | ITVQNDELFSRGTDLFHDPA | |
| | | | | | | RLQEFLDDEVTERGLTDAEV | |
| | | | | | | FDPLTYKVLAVGGLLGSDAD | |
| | | | | | | MTTAPPLPPKSVVELARHGE | |
| | | | | | | AVILDRPDQRRVRAVVALGG | |
| | | | | | | NSGLMLVITRPVDPDVVEHM | |
| | | | | | | RRTDTLVADYQRLITNRGKT | |
| | | | | | | QVLFAVIFALMGLLVLAVGM | |
| | | | | | | LTGLALANRIANPLGLLILA | |
| | | | | | | AQRISKGDLGVRVPVPDDAG | |
| | | | | | | QDKDDEVTGLSRAFNSMTDQ | |
| | | | | | | LESQRSELMQAYDQINERRR | |
| | | | | | | FTETVLAGVSAGVIGLDRMQ | |
| | | | | | | VIELPNRAASSVLQRDLQPA | |
| | | | | | | IGMKLTDRVPEFSGLLEAAR | |
| | | | | | | MAPERVHTAEIQVDTEGAQR | |
| | | | | | | PGGPGEGAGAGAGRTLLVRV | |
| | | | | | | VAELRGQEVAGYVVTFDDIT | |
| | | | | | | DLQSAQRKAAWADVARRVAH | |
| | | | | | | EIKNPLTPIQLAAERLKRRF | |
| | | | | | | LKEIHSDPETYTQLVDTIVR | |
| | | | | | | QVGDIGRMVDEFSAFARMPQ | |
| | | | | | | PVMQPEDFSRLCREALVLQR | |
| | | | | | | NAHPEIVFETTGLPPSGPIV | |
| | | | | | | RCDRRLIGQALTNLLQNAAD | |
| | | | | | | AISMAGRGKPGENASGQPVQ | |
| | | | | | | PIGHIVVGLHIRSGHVLLDI | |
| | | | | | | EDDGIGLPTVERHRLTEPYV | |
| | | | | | | THKAKGTGLGLAIVKKIMED | |
| | | | | | | HSGMLQLTDRAPDQSRGASP | |
| | | | | | | GQRGTRVTLSLPLWEQESHV | |
| | | | | | | PGGTDLQTMRTADGT | |
| GO_ | oprB | Outer membrane | H | | Up | MPVLASFARTSSRIRSEHLR | 203 |
| 630 | | low | | | | SVLMGLFSVSMLSAAVDSAQ | |
| | | permeability | | | | AQSDPDPNSARHRVSRAAAL | |
| | | porin, | | | | SSPAPQNSETPANGGSNTPI | |
| | | OprBfamily | | | | MQNTVSGFAQTEGDPGPYFS | |
| | | | | | | APMGSQHFLGDWGGVQPWLL | |
| | | | | | | KRGIHLMAAINEEFAGNFTG | |
| | | | | | | GKERAYSDAGQFGIELDIDW | |
| | | | | | | DKLAGVRNFWTHTLIVNGHG | |
| | | | | | | QSVSRNFGDSIAGVQQIYGA | |
| | | | | | | RGNVVAHMVAMYGEMSFVHN | |
| | | | | | | RIDVSAGWIPVGSFFAASPL | |
| | | | | | | FCDFMNVAMCGNPAPNKYTE | |
| | | | | | | GNRDWPSGNLGAVVRAMPTM | |
| | | | | | | DTYIMAGLFAVSPHSYNGGI | |
| | | | | | | SGWSWAQSGLGKFSTPVEIG | |
| | | | | | | WTPRFGHNQLQGHYVIGYSY | |
| | | | | | | DNSRYLNLYEDIHGNSWQLT | |
| | | | | | | GQPRRYEAGRNSAWLILDQM | |
| | | | | | | LVRNGPGNTNGLIAMAGAMY | |
| | | | | | | SDGKTVAMRDHEWAGLVDTG | |
| | | | | | | SAWGRPLDTVGAMYQHFDMS | |
| | | | | | | HTAALQQESSLALGLPYQDN | |
| | | | | | | QWGAVYGPQSHENVYELFYS | |
| | | | | | | AHIARAMALQPDFQYIQRPS | |
| | | | | | | ATTTFHDAAVLGVQFTVVL | |
| GO_ | pa2737 | Transcriptional | H | | Up | MTDNSTSQAVMVSPNDDFAS | 204 |
| 1855 | | regulator | | | | APEKVRKAPEAYRTISEVAE | |
| | | PA2737, | | | | ELHIPQHRLRSWETIYPGVK | |
| | | MerR family | | | | PFRGESGRRYYSPEHIETLR | |
| | | | | | | LISDLLYVQGYKGQGVLRVL | |
| | | | | | | RERRAEKARAAQKAVPETAP | |
| | | | | | | ETVPEVSAVSAEAVHVPLVM | |
| | | | | | | VEATEENPAPVVDATPVTEP | |
| | | | | | | VENEDSPVTLTEASVDDIVF | |
| | | | | | | PEVPAAAHEVVVTETVDSTA | |
| | | | | | | ENESPEAEAEAEAEAEAEAE | |
| | | | | | | AEAEAEAEAEAEAEAPDSAL | |
| | | | | | | LVTLRDENELLENTLEKTEA | |
| | | | | | | ENSLLRSELREILEELRNLR | |
| | | | | | | NLLPV | |
| GO_ | pemT | Phosphatidyl | H | | Up | MSSTLSPRSALDAEAVKTAY | 205 |
| 2563 | | ethanolamine N- | | | | RRWARVYDTVFGGISGYGRK | |
| | | methyltransferase | | | | RAVAAVNALPGERVLEVGVG | |
| | | (EC 2.1.1.17) | | | | TGLALPSYSRDKRITGIDLS | |
| | | | | | | EDMLERARIRVLQDHLTNVD | |
| | | | | | | DLLEMDAEATTFEDDSFDIA | |
| | | | | | | VAMFVASVVPHPDRLLAELK | |
| | | | | | | RVVKPGGHILFVNHFLATGG | |
| | | | | | | LRLSVERGMARASRSLGWHP | |
| | | | | | | DFAIESLLPPEDLRRATLTP | |
| | | | | | | VPPAGLFTLVTLPQCESKSD | |
| | | | | | | AAALVA | |
| GO_ | plsY | Acyl- | H | | Up | MSGFQAQLILLSLISYVIGS | 206 |
| 2931 | | phosphate: | | | | IPFGLLLTALGGGGDIRKIG | |
| | | glycerol-3- | | | | SGNIGATNVLRTGRRGLAAA | |
| | | phosphateO- | | | | TLLLDALKGAMAVLIARFFF | |
| | | acyltransferase | | | | PGASETTMAVAAVAVVIGHC | |
| | | PlsY | | | | FPVWLGFRGGKGVATGLGTI | |
| | | (EC 2.3.1.n3) | | | | WVLSWPVGLACCVVWLLVAR | |
| | | | | | | LSRISSAGALAAFFIAPVLM | |
| | | | | | | VLLSGRTLHSPIPVATLLVS | |
| | | | | | | LLIWVRHSSNIARLLTGREP | |
| | | | | | | RVNVDPASRR | |
| GO_ | pqqB | None (82 bp | H | | Up | MIDVIVLGAAAGGGFPQWNS | 207 |
| 2302 | | upstream from | | | | AAPGCVAARTRQGAKARTQA | |
| | | Coenzyme PQQ | | | | SIAVSADGKRWFILNASPDL | |
| | | synthesis | | | | RQQIIDTPALHHQGSLRGTP | |
| | | protein B) | | | | IQGVVLTCGEIDAVTGLLTL | |
| | | | | | | REREPFTLMGSDSTLQQLAD | |
| | | | | | | NPIFGALDPEIVPRVPLLLD | |
| | | | | | | EATSLMNKDGIPSGLLLTAF | |
| | | | | | | AVPGKAPLYAEAAGSRPDET | |
| | | | | | | LGLSITDGCKTMLFIPGCAQ | |
| | | | | | | ITAEIVERVAAADLVFFDGT | |
| | | | | | | LWRDDEMIRAGLSPKSGQRM | |
| | | | | | | GHVSVNDAGGPVECFTTCEK | |
| | | | | | | PRKVLIHINNSNPILFEDSP | |
| | | | | | | ERKDVERAGWTVAEDGMTFR | |
| | | | | | | LDTP | |
| GO_ | priA | Helicase PriA | H | | Up | MASNSLSKPAPWRKPSSAGT | 208 |
| 1198 | | essential for | | | | RVSVLVPLPFPGPLDYLAPM | |
| | | oriC/DnaA- | | | | PLEPGELVTVPLGRRETVGC | |
| | | independentDNA | | | | VWETDRTLPADFALPVGREV | |
| | | replication | | | | PLARLRPVAGKLDVRPLPQS | |
| | | | | | | LRRFIDWVAAYTLTPPGLVL | |
| | | | | | | AMATRIHLKDAPRPTLGWVR | |
| | | | | | | TEMPEGDLRITPARRSVLNF | |
| | | | | | | ASSTPMTTAELGSRSGASAA | |
| | | | | | | VIRGLATAGLLREAVIAVAA | |
| | | | | | | PFATPDPSHGAPKLSEEQAE | |
| | | | | | | VAQELCGPVEAGRFQVTLLE | |
| | | | | | | GVTGSGKTEVYFEAVAACLA | |
| | | | | | | KGKQVLVLLPEIALSAQWTD | |
| | | | | | | RFIRRFGAEPAVWHSDLGAK | |
| | | | | | | RRRETWRAVAEGSARVVVGA | |
| | | | | | | RSALFLPFSDLGLVVVDEEH | |
| | | | | | | ESAFKQEEGVMYHGRDMAVV | |
| | | | | | | RARLADAPAILVSATPSLET | |
| | | | | | | LANVESGRYRHELLTARHGG | |
| | | | | | | ATLPDVSLVDMRADPPERGL | |
| | | | | | | FLSPKLCTAIDETLEKGEQA | |
| | | | | | | MLFLNRRGYAPLTLCRACGH | |
| | | | | | | RMQCPNCSAWLVEHRARGIL | |
| | | | | | | TCHHCGHTERIPKDCPECHA | |
| | | | | | | ENSLVPIGPGIERITEEAKL | |
| | | | | | | RFPDAKLLVMSSDTLGSPAA | |
| | | | | | | TAEAVRKISDGEVNLIIGTQ | |
| | | | | | | IVAKGWHFPKLTLVGVVDAD | |
| | | | | | | LGLGGGDLRAAERTVQLLHQ | |
| | | | | | | VAGRAGRAEHRGRVLLQSYV | |
| | | | | | | GEHPVMTALVSNDFQTFMEQ | |
| | | | | | | EAEQRRPSFWPPYGRLAALI | |
| | | | | | | VSAPSAEAADALAREIALSA | |
| | | | | | | PEREGVQVLGPAPAPLAVLR | |
| | | | | | | GRHRRRLLLRTMRGIAVQPI | |
| | | | | | | LRQWLGDIKPTGGAKVDIDI | |
| | | | | | | DPISFL | |
| GO_ | proX | Glycine | H | | Up | MTQMTIGHLYTSLHAGCASA | 209 |
| 1638 | | betaine/L- | | | | VARVLEAYEVEVEYVDLDPD | |
| | | proline | | | | DIEDALEGAEVDLLVSAWFP | |
| | | transportsubstrate- | | | | RDEKFAGPGRRVLGDLYQPV | |
| | | binding | | | | VSFAALLPLAAVGTLTSADV | |
| | | protein ProX | | | | DRIIVSDDSRQALEDALKQL | |
| | | (TC 3.A.1.12.1) | | | | PALSVLPIESIGEGALIERL | |
| | | | | | | EKARDAGEKPLVVATQPHAV | |
| | | | | | | FHTDLLTVIEDPAHLLGGEM | |
| | | | | | | SARMIMREDVARQADSDLLD | |
| | | | | | | ELSEMMLGNRVMSALDYVIS | |
| | | | | | | VEGQDPEGAAEAWQRGRLIG | |
| | | | | | | R | |
| GO_ | putR | Predicted | H | | Up | MSEAEPIFTPVDTKSGSASL | 210 |
| 548 | | regulator | | | | EIAEALRRAITNGILTDGQP | |
| | | PutR for | | | | MRQSELARNFGVSTIPVREA | |
| | | prolineutilization, | | | | LKQLEAEGLIAFLPHRGAVV | |
| | | GntR family | | | | TGLSEADILEYSDIRASLES | |
| | | | | | | MAAGLAMTSLTRVDLARIED | |
| | | | | | | AYEAFVSGTGGTHGMEQSGR | |
| | | | | | | LNWEFHGAIYAAAQRPRLYG | |
| | | | | | | MIHDLHSRLDRYIRAHLELP | |
| | | | | | | GRKTATDAEHFQILQACRAR | |
| | | | | | | DGEELGRLTKQHILEAASLS | |
| | | | | | | LDVIRNRTTP | |
| GO_ | rarA | Replication- | H | | Up | MTDMTDLFGGAPEANRAPGH | 211 |
| 1388 | | associated | | | | ASARGPSRAPESMRQQRPIE | |
| | | recombination | | | | APQVQRRPPSRTQPLADRLR | |
| | | proteinRarA | | | | PRRLEDVRGQDHLLGPEGTL | |
| | | | | | | TRMLERGTLSSLILWGGPGC | |
| | | | | | | GKTTIARLLAGRAGLFYSQI | |
| | | | | | | SAVFSGVADLRRAFEEADQK | |
| | | | | | | QAATGKGTLLFVDEIHRFNR | |
| | | | | | | AQQDGFLPYVERGTVVLVGA | |
| | | | | | | TTENPSFALNAALLSRCQVL | |
| | | | | | | VLNRLDDASLESLLLHAEEE | |
| | | | | | | VGRPLPLDPEARASLRAMAD | |
| | | | | | | GDGRYLLNMVEQLVALDPSK | |
| | | | | | | VLTPRDLAAILSRRAILYDR | |
| | | | | | | DREEHYNLISALHKSLRGSD | |
| | | | | | | PDAALYWFARMLEGGEDPRY | |
| | | | | | | IARRLTRFAAEDVGQADPSA | |
| | | | | | | LPMAVAGWQTYERLGSPEGE | |
| | | | | | | LALAQVVVHLATAPKSNAVY | |
| | | | | | | TAYKAARALARDTGSLMPPS | |
| | | | | | | HILNAPTSLMKDIGYGKGYE | |
| | | | | | | YDHDSEDAFSGQNYFPDGMP | |
| | | | | | | RASLYHPTDRGHEGRIRKLL | |
| | | | | | | DMRAAKRASREP | |
| GO_ | rbfA | Ribosome- | H | | Up | MKGPAGVSAHGPSTRQLRVA | 212 |
| 1471 | | binding | | | | EEVRRVLAELFARTEFRDPE | |
| | | factor A | | | | LLDVRITVTEVRISPDFRHA | |
| | | | | | | TAFVTRLGRSDVEVLLPALK | |
| | | | | | | RVAPFLRTGLSKALNLRTVP | |
| | | | | | | EIHFQPDTALDNAMELDEIM | |
| | | | | | | RSPEVQRDLNSKPE | |
| GO_ | reck | Regulatory | H | | Up | MEDRPAPLPVPDAASLREAA | 213 |
| 2904 | | protein | | | | LAHLARFATTEQGLRQVLDR | |
| | | RecX | | | | RLRRWGVCASRAGLPNEDIE | |
| | | | | | | STIAAVSPAIDGIVASMTDL | |
| | | | | | | GAVDDAGYARNRAVSLTRTG | |
| | | | | | | RSRRAVEAHLANKGVDQNTT | |
| | | | | | | REALNDSLGERSDSSAQEAE | |
| | | | | | | LAAALVLARKRRLGPFQRPD | |
| | | | | | | REEEDPLKALGVFARNGFSR | |
| | | | | | | DVAQSVLDMDSDEAEDRIIA | |
| | | | | | | FRSL | |
| GO_ | rfbD | O-antigen | H | | Up | MSVSSPASDVARNDAPHRQV | 214 |
| 635 | | export | | | | SRDALRGSPAARAWADWKET | |
| | | system permease | | | | RRLWRLGVRLGWLDIRLRYR | |
| | | protein RfbD | | | | GSALGPFWLTITSALMVASM | |
| | | | | | | GVLYSKLFHMQLASYLPFLS | |
| | | | | | | LSLTLWSVGFSSLIQESCTC | |
| | | | | | | FLDAEDMVRSVRLPFLLYAV | |
| | | | | | | RVVVRNAIVFAHNIVVPLGV | |
| | | | | | | FALYHLWPGMDALLAIPALL | |
| | | | | | | LWGLDGFAACMLFGSLCARF | |
| | | | | | | RDVAPIIGALLQIVFYVTPV | |
| | | | | | | IWMPQQLGPRAAYLLYNPFY | |
| | | | | | | PLLEIVREPLLGHVPSLQIW | |
| | | | | | | GIALATSAVFWLIAVRSFIR | |
| | | | | | | VRSRLVFWI | |
| GO_ | rneE | Ribonuclease | H | | Up | MRSDCTVPSTPHNLTFRLAK | 215 |
| 380 | | E (EC 3.1.26.12) | | | | AAIVERRGVQFSMTKRMLID | |
| | | | | | | TTHAEETRVVVMDGDRVEDY | |
| | | | | | | DVETSTKKQLKGNIYLAKVI | |
| | | | | | | RVEPSLQAAFVEYGGNRHGF | |
| | | | | | | LAFSEIHPDYFQIPVADREK | |
| | | | | | | LIALQEEEIAERGDAADDGE | |
| | | | | | | TETVSEEATDSEDGENQDRR | |
| | | | | | | APETVGGEHDTGEESASSRR | |
| | | | | | | TARFLRNYKIQEVIRRRQVL | |
| | | | | | | LVQVVKEERGNKGAALTTYI | |
| | | | | | | SLAGRYCVLMPNALRGGGVS | |
| | | | | | | RKITSDSDRRRLRDVIAELD | |
| | | | | | | LPKSMAMIVRTAGAGRPAQE | |
| | | | | | | VTRDCEYLLQLWDDIRSHAL | |
| | | | | | | SSVAPTLVYEEASLIKRVIR | |
| | | | | | | DLYSKDIEDILVDGEAAWKS | |
| | | | | | | AREFMRLLMPSNANKVKLWQ | |
| | | | | | | NRGQSLFARYNVEGHLDAMF | |
| | | | | | | SPTARLPSGGYLVINQTEAL | |
| | | | | | | VAIDVNSGKSTSQRNIEETA | |
| | | | | | | LRTNLEAAEEVGRQLRLRDL | |
| | | | | | | AGLVVIDFIDMESRRHNAQV | |
| | | | | | | EKRLKEALRSDRARIQVGHI | |
| | | | | | | SHFGLLEMSRQRLRPSIAES | |
| | | | | | | VLTPCPHCQGTGFIRGTESS | |
| | | | | | | ALHVLRAIDEEGARQRSSEI | |
| | | | | | | EVHVGSDIALYILNHKRSWL | |
| | | | | | | ADIERHHRMQVIFRTEENLA | |
| | | | | | | AADMRIERLQAQTPAPAQVR | |
| | | | | | | APERAPEHVRTIEIIEEEAP | |
| | | | | | | VVVRTETPVVDAEIIEDVAT | |
| | | | | | | SESEEESNGGRRRRRRRRRG | |
| | | | | | | GRREQNGDVPAAENSQEQDA | |
| | | | | | | PKAETREIAAPEAADENGII | |
| | | | | | | PGRRRTRFKRVVKDTEGSED | |
| | | | | | | TAAQPVSEVRDVAPTRPAAT | |
| | | | | | | TRSSAPAPTRTPRRREDREE | |
| | | | | | | RPAPRRYTGPTPADPFGGSF | |
| | | | | | | DIFDVIEQAELEGTTEALQT | |
| | | | | | | GISTPTEIVIEHVPAAETTI | |
| | | | | | | VVEEPVAEEAPKPRRGRGRR | |
| | | | | | | PARAKAVEAAPAETVAEEAP | |
| | | | | | | AAEAAPAPEEPVAEEPPKPR | |
| | | | | | | RTRTRRTPKAQAVEAEAPAE | |
| | | | | | | PTAEVAASPAETVSEEAVKP | |
| | | | | | | KRTRARRTPKAKPVEAQTTE | |
| | | | | | | EGNILQPVNVDEVAPTKRRA | |
| | | | | | | GWWKR | |
| GO_ | rodA | Rod shape- | H | | Up | MRRNGMNTFGFLKSDRRLLR | 216 |
| 391 | | determining | | | | AEPDFRPMARLLQVNWLYVL | |
| | | protein | | | | LVCLLAGVGYIALYSAGGGS | |
| | | RodA | | | | AKPFAGPQMVRFGFGLVMMI | |
| | | | | | | AVSLVSPRILRMASVPIYLL | |
| | | | | | | SVTLLALVLRMGHVGKGAER | |
| | | | | | | WINLAGMQFQPSEFAKIGLV | |
| | | | | | | LMLATWFHRIGNERMGNPLR | |
| | | | | | | LIPPALLTLLPVLLVLKEPN | |
| | | | | | | LGTATIIGVIGATMFFAAGM | |
| | | | | | | RLWQILLLVAPLPFMGKLIY | |
| | | | | | | SHLHDYQKARIDTFLHPEHD | |
| | | | | | | PLGAGYNIIQSKIALGSGGM | |
| | | | | | | WGEGYLHGSQGQLNFLPEKQ | |
| | | | | | | TDFIFTMIGEEWGFVGGIAV | |
| | | | | | | ITLLGTLVMGGMLIAIRSRN | |
| | | | | | | QFGRLLGLGIAMDFFLYCAV | |
| | | | | | | NLSMVMGAIPVGGVPLPLIS | |
| | | | | | | YGGSAMLTMMFGFGLLMSAW | |
| | | | | | | VHRNERDPGEDEDEDD | |
| GO_ | slp | SSU ribosomal | H | | Up | MDIRSAKGTGIREYSIYMAS | 217 |
| 1056 | | protein Slp | | | | ATQTPTANHGTEDFAALLEE | |
| | | | | | | TLGRDTGFDGSVVTGRVVRL | |
| | | | | | | TDEFAIVDVGLKSEGRVSLK | |
| | | | | | | EFGPAGVAPDVKPGDVVELY | |
| | | | | | | VERYEDRDGSIVLSREKARR | |
| | | | | | | EEAWTALERAFANNQRVNGT | |
| | | | | | | IYGRVKGGFTVDLGGAMAFL | |
| | | | | | | PGSQVDIRPVRDVGPLMGQP | |
| | | | | | | QPFQILKMDRARGNIVVSRR | |
| | | | | | | AVLEETRAEQRSELIQGLKE | |
| | | | | | | GMILDGVVKNITDYGAFVDL | |
| | | | | | | GGVDGLLHVTDIAWKRINHP | |
| | | | | | | SEALQIGQPVRVQVIRFNPD | |
| | | | | | | TQRISLGMKQLEADPWENVA | |
| | | | | | | IKYPAGARFTGRVTNITDYG | |
| | | | | | | AFVELEPGVEGLVHVSEMSW | |
| | | | | | | TKKNVHPGKIVATSQEVDVM | |
| | | | | | | VLDVDSAKRRISLGLKQVQR | |
| | | | | | | NPWEQFEEEHKVGSIIEGEI | |
| | | | | | | RNITEFGLFVGLSADIDGMV | |
| | | | | | | HMSDLSWDEPGEAAMAHYEK | |
| | | | | | | GQVVKAKVLDVDPEKERISL | |
| | | | | | | GIKQLQEDPAADTLSRVQKG | |
| | | | | | | AVVTCVVTAVQSNGIEVKVD | |
| | | | | | | DVLTGFIRRAELARDKAEQR | |
| | | | | | | PERFAVGEKVDAKVVSVDRA | |
| | | | | | | SRKLALTIRGREVEEDKQAI | |
| | | | | | | NEYGSSDSGASLGDILGAAI | |
| | | | | | | RRRNTDA | |
| GO_ | s21p | SSU ribosomal | H | | Up | MQVLVRDNNVDQALKALKKK | 218 |
| 1844 | | protein S21p | | | | MQREGVFREMKLRRHFEKPS | |
| | | | | | | EKRAREAAEAVRRARKMERK | |
| | | | | | | RLEREGF | |
| GO_ | s9p | SSU ribosomal | H | | Up | MSETQERTGTLQDLASVAPA | 219 |
| 188 | | protein S9p | | | | VTSNAAPVHEVKRDAQGRSY | |
| | | (S16e) | | | | ATGRRKDAVARVWIKPGKGD | |
| | | | | | | IIVNGRPVTTYFARPVLRML | |
| | | | | | | LTQPFLIADRYNQFDVYCTV | |
| | | | | | | TGGGLSGQAGAVRHGISRAL | |
| | | | | | | TYYEPSLRGILKAAGFLTRD | |
| | | | | | | SRIVERKKYGRAKARRSFQF | |
| | | | | | | SKR“ | |
| GO_ | sldB | Broad- | H | | Up | MPNTYGSRTLTEWLTLLLGG | 220 |
| 3173 | | specificity | | | | VIILVGLYFVIAGGDLAMLG | |
| | | glycerol | | | | GSVYYVICGILLVAGGVFMV | |
| | | dehydrogenase | | | | MGRTLGAYLYLGALAYTWVW | |
| | | (EC 1.1.99.22), | | | | SLWEVGFSPVDLLPRAFGPT | |
| | | subunit SldB | | | | LLGILVALTIPVLRRMETRR | |
| | | Gluconate 5- | | | | TLRGAV | |
| | | dehydrogenase, | | | | | |
| | | smallsubunit | | | | | |
| GO_ | tolQ | Tol-Pal system | H | | Up | MDHEVSSSALGAVGAAGLSP | 221 |
| 1367 | | protein TolQ | | | | LDLFLHASIVVKLVMLGLLL | |
| | | | | | | CSAGVWAIIAEKIILIRRVN | |
| | | | | | | REATEFEDRFWSGGSLDDLY | |
| | | | | | | ESDGARPTHPMAAVFGAAMG | |
| | | | | | | EWRRSARIGGIDLSRGGVRE | |
| | | | | | | RVDRAIDITIMRENDRLTRR | |
| | | | | | | LIFLATIGPVAPFVGLFGTV | |
| | | | | | | WGIMHSFASIAQMHNTNLSV | |
| | | | | | | VAPGISEALFATAIGLVTAI | |
| | | | | | | PAYIAYNGLSNSFEKFADRM | |
| | | | | | | EAFGTEFAAILSRQSEERAD | |
| | | | | | | DTTGGKA | |
| GO_ | tolR | Tol biopolymer | H | | Up | MGMSAGGRAGGGGRRKRRPA | 222 |
| 1366 | | transport system, | | | | SEINVTPLVDVMLVLLIIFM | |
| | | TolR protein | | | | VTAPMLTSGVNVDLPKTDAS | |
| | | | | | | PVNSDTKPITVSLRTDGSLY | |
| | | | | | | LGDQQVTSDQLIDQLKAQSQ | |
| | | | | | | NDPTHRIFVRADAHIDYGQV | |
| | | | | | | MQVMGQITSGGFTHVALLAQ | |
| | | | | | | QPQSGQ | |
| GO_ | trxa | Thioredoxin | H | | Up | MSANTVAVSDSSFEADVLKS | 223 |
| 1087 | | | | | | EGPVLVDFWAEWCGPCKMIA | |
| | | | | | | PALEEIGAEYQGRLKVAKVN | |
| | | | | | | IDSNPEAPTKYGVRSIPTLI | |
| | | | | | | VFKDGKPVAQQMGALPKSQL | |
| | | | | | | KAWIDQSL | |
| GO_ | uvrD/ | ATP-dependent DNA | H | | Up | MPQDLPSPTPEYLSRLNPEQ | 224 |
| 2012 | pcrA | helicase UvrD/PcrA | | | | RRAIETTEGPLLILAGAGTG | |
| | | (EC 3.6.4.12) | | | | KTRVLTTRFAHILLTGRAYP | |
| | | | | | | SQILAVTFTNKAAREMRERV | |
| | | | | | | SAILGEPAEGLWLGTFHAIC | |
| | | | | | | ARMLRRHAEYVGLTSSFNIL | |
| | | | | | | DTDDQIRLLKQVMEPWKIDT | |
| | | | | | | KRWPPNQLMGIIQRWKDRGL | |
| | | | | | | TPDRVTPVEDSDFANGHALA | |
| | | | | | | IYRAYQERLIALNTCDFGDL | |
| | | | | | | MLHMTEILRNQPNVLAQYHR | |
| | | | | | | IFRYILVDEYQDTNTVQYLW | |
| | | | | | | LRLLAKREHGPSNIACVGDD | |
| | | | | | | DQSIYSWRGAEVENILRFEK | |
| | | | | | | DFPGAEVVRLERNYRSTAQI | |
| | | | | | | LAAAAGLIAHNEGRLGKTLR | |
| | | | | | | PGRDDAQGEKVQIIGVRDSD | |
| | | | | | | EEARIVGGAIERLRGDGHPL | |
| | | | | | | SEIAILMRAGFQTRPFEERL | |
| | | | | | | MMIGIPYRVVGGLRFYERSE | |
| | | | | | | IRDCLAYLRVLSQPADDLAF | |
| | | | | | | ERIINVPKRGVGAVAVQKLH | |
| | | | | | | AQARALPGPLTAAVIWQLQE | |
| | | | | | | GLLKGKSKEALDGLMAAFQR | |
| | | | | | | AKATLETEGHVVAAEQLLED | |
| | | | | | | SGYLQMWRDDRSVEAPGRLD | |
| | | | | | | NIRELLRALGEFGTLQGFLE | |
| | | | | | | HVALVMDTESETSDDKVSLM | |
| | | | | | | TLHGAKGLEFDTVFLPGWEE | |
| | | | | | | GVFPSQRSLDEGGNRALEEE | |
| | | | | | | RRLAYVGLTRARRRAIVLHA | |
| | | | | | | ASRRIYANWQSSMPSRFIEE | |
| | | | | | | IPSEYVQLTGQAFETRRQAA | |
| | | | | | | AAPSMFASGPLTSTRPSGFR | |
| | | | | | | APRPKIHDVKPEPTVAIGAT | |
| | | | | | | VFHHRFGEGTVIGADGPQLH | |
| | | | | | | INFENGGVKRVMANFVEIRS | |
| GO_ | ybbN | FIG000875: | H | | Up | MSSTFDEHLIGQSSGKAPAG | 225 |
| 3271 | | Thioredoxin | | | | AAATIIDADQTTFMADVVEA | |
| | | domain- | | | | SREIPVLVDFWAPWCGPCKQ | |
| | | containing | | | | FTPVLEKVVHAAGGRIRLVK | |
| | | proteinEC- | | | | VDVEANQALAAQLGQLGLPL | |
| | | YbbN | | | | QSIPLVVAFWKGQVLDLFQG | |
| | | | | | | AQPESEVRRFVESLLKLAGD | |
| | | | | | | VMPATEILAAARQALADGHA | |
| | | | | | | DQAAGLFSQLLEAEPENPEA | |
| | | | | | | WGGMIRALIALNEPEAAQDA | |
| | | | | | | SAQVPAKLDSHPEITGARAA | |
| | | | | | | LALHAEGAKAASELETLRQQ | |
| | | | | | | SAAAPDDFDLRVRLAAALNG | |
| | | | | | | AGERAEAANTLLDILRKDRN | |
| | | | | | | WNEGAAKTELLRFFEAWGHT | |
| | | | | | | DPDTLAARRKLSSLLFS | |
| GO_ | ycaR | FIG002473: | H | | Up | MTTELDPRLLSLLVCPVTKG | 226 |
| 3269 | | Protein | | | | PLTYDRETQELISPRAKLAF | |
| | | YcaR in KDO2- | | | | PIRDGIPIMLPEEARQIDA | |
| | | Lipid | | | | | |
| | | Abiosynthesis | | | | | |
| | | cluster | | | | | |
| GO_ | ftsJ | 23S rRNA | H | | Up | MKPPRSRSGSSKDTGPKRIP | 227 |
| 2100 | | (uridine(2552)- | | | | GKALKSASNPGENDATLDSA | |
| | | 2′-O)- | | | | TARTARNKTVSLRTARGRTT | |
| | | methyltransferase | | | | AQQRWLNRQLNDPYVAAARK | |
| | | (EC | | | | QGWRSRAAFKLIEIDDRFKL | |
| | | 2.1.1.166) | | | | IGEGTRIIDLGAAPGGWTQV | |
| | | | | | | AVKRGAQHVVGLDLLPVDPV | |
| | | | | | | AGAEIIEGDFTDPEMPDRLK | |
| | | | | | | DMLGGPADLVMSDMAPNTTG | |
| | | | | | | HAATDHMRIMGLAEGALDFA | |
| | | | | | | FQVLAEGGSFIAKVFQGGSE | |
| | | | | | | KDMLALMKTAFSSVKHVKPP | |
| | | | | | | ASRKESSELYVIATGFRPER | |
| | | | | | | LPEGGKGA | |
| GO_ | GO_ | Alkyl | H | | Up | MVRINSPLKPFSTDAFRNGE | 228 |
| 47 | 47 | hydroperoxide | | | | FLTVTDSDVRGKWSVFFFYP | |
| | | reductase | | | | ADFTFVCPTELEDLADNQAA | |
| | | protein C | | | | FDKLGVEIYSVSTDKHFTHK | |
| | | (EC 1.11.1.15) | | | | AWHDTSPAIGKIKYTMLGDP | |
| | | | | | | TGAIARNFDVLIEEAGLADR | |
| | | | | | | GTFLIDPEGKIQYIEITAGG | |
| | | | | | | VGRSATELLEKIQAAQYVAT | |
| | | | | | | HPGEVCPAKWKEGGETLKPS | |
| | | | | | | LDLVGKI | |
| GO_ | g6pd | Glucose-6- | H | | Up | MEHFQQVEPFDYVIFGATGD | 229 |
| 1805 | | phosphate | | | | LTMRKLLPALYNRLRMGQIP | |
| | | 1-dehydrogenase | | | | DDACIIGAARTELDREAYVA | |
| | | (EC 1.1.1.49) | | | | RARDALERFLPSDILSPGLV | |
| | | | | | | ERFLARLDYVTLDSSREGPQ | |
| | | | | | | WDALKSLLAKAQPDRVRVYY | |
| | | | | | | FATAPQLYGSICENLNHYGL | |
| | | | | | | ITPTSRVVLEKPIGTNMATA | |
| | | | | | | TAINDGVGQYFPEKQIYRID | |
| | | | | | | HYLGKETVQNVLALRFANPL | |
| | | | | | | MNAAWSGEHIESVQITAVET | |
| | | | | | | VGVESRAAYYDTSGALRDMI | |
| | | | | | | QNHLLQVLCLVAMEAPDSLE | |
| | | | | | | ADAVRNAKLAVLNALRPITD | |
| | | | | | | ATAATETVRAQYTAGVVDGE | |
| | | | | | | NVPGYLEELGKPSTTETYAA | |
| | | | | | | IRAWVDTPRWKNVPFYIRTA | |
| | | | | | | KRSGKKVSEIVITFRPAATT | |
| | | | | | | MFGASPASNRLVLRIQPNEG | |
| | | | | | | VDLRLNVKNPALDVFNLRPA | |
| | | | | | | DLDTSIRMEGGLPFPDSYER | |
| | | | | | | LLLDAVRGDPVLFIRRDEVE | |
| | | | | | | AAWRWAEPILDAWKNDKAPM | |
| | | | | | | QTYSAGSYGPEQATQLLASH | |
| | | | | | | GDTWHEASE | |
| GO_ | GO_ | Membrane | H | | Up | MTDLHDTLLTLDSHIDIPWP | 230 |
| 2091 | 2091 | dipeptidase | | | | DRQDAWVEETPRQVNVPKTR | |
| | | (EC: 3.4.13.19) | | | | KGGLRAVCLAAYIPQGPRDE | |
| | | | | | | AGHAEGWERVQGMLDVIAGL | |
| | | | | | | EGRQGDQGARVCRTAADVRA | |
| | | | | | | AYKAGELAVIPAIENGHGLG | |
| | | | | | | GRPERIAELARRYGVRYMTL | |
| | | | | | | THNGHNALADAAIPRKDLAD | |
| | | | | | | NETLHGGLSDLGRETIAKMN | |
| | | | | | | RSGVLVDVSHAAKSTMMQAT | |
| | | | | | | EVSITPVFASHSCARALCDH | |
| | | | | | | PRNLDDEQLDRLKETGGLIQ | |
| | | | | | | VTAMGSFLKKGGGGTVEDLV | |
| | | | | | | RHVSYIADRIGVEHVGISSD | |
| | | | | | | FDGGGGIPGWKDATETANVT | |
| | | | | | | QALQAAGFSDTDISSIWGGN | |
| | | | | | | MLRLLETAERAAEKV | |
| GO_ | GO_ | Multimodular | H | | Up | MTRRSFRSRNPQGSGNPQGP | 231 |
| 2951 | 2951 | transpeptidase- | | | | GAPPPRPPRFRRYRQSLAII | |
| | | transglycosylase | | | | AGVGLVGIAGAGVLGWTTYA | |
| | | (EC 2.4.1.129) (EC | | | | KLVADLPSVDSLRAYQPPTV | |
| | | 3.4.—.—) | | | | SRIYASDDRLMAELANERRI | |
| | | | | | | FVPINAIPERVKNAFIATED | |
| | | | | | | HNFYTHGGVDFMAIGRAGLT | |
| | | | | | | DIFARHGRRPLGASTITQQV | |
| | | | | | | AKVMLLNSNVLSFDRKIKEA | |
| | | | | | | LLAMKMEQVLSKDKILEIYL | |
| | | | | | | NGIYLGNGAYGVAAAAQSYF | |
| | | | | | | NKPLDQLDDAEAASLAALPK | |
| | | | | | | SPTNYNPFLHPQAAMARRNL | |
| | | | | | | VLDLMVEAGVLTRQQADQEK | |
| | | | | | | QEPLVPQQKQRFGPLPDSEW | |
| | | | | | | FGEEVRRQLIAQYGQERAAQ | |
| | | | | | | GGLEVHTSLDQSLQVTETRL | |
| | | | | | | LHEGLMNYDRVHSGWRGPLR | |
| | | | | | | NLPDIQDDGWESALDHITPP | |
| | | | | | | GGMLREWRLAVVLPGATHVG | |
| | | | | | | WIEEGTARKGALLATDMAWA | |
| | | | | | | RRMRPLRAGDVIMIEPQEGG | |
| | | | | | | SAALRQIPQVEGAAVTLDVH | |
| | | | | | | TGRVLAMVGGWSFHESQFNR | |
| | | | | | | VTQALRQPGSSFKPFVYLAA | |
| | | | | | | MEKGISPSERFDDSPVSYGD | |
| | | | | | | WHPQNYEHDNWGPTTLHDAL | |
| | | | | | | RESRNLVTIRVAAHLGMKAV | |
| | | | | | | ADTAIRAGLVAQMPHVLPAA | |
| | | | | | | LGAVETTVMREAAAYATIAN | |
| | | | | | | GGHIVTPTLVDDIQDRAGTV | |
| | | | | | | LWQAGGLTLGTAMQAPPAEQ | |
| | | | | | | PVPADGTTTSAAPATAPVAP | |
| | | | | | | SATPTTPPPGSVAVPALTDG | |
| | | | | | | RPVLASEQSTFQIVKMMQDV | |
| | | | | | | IARGTGRMAGVGIDRPIAGK | |
| | | | | | | TGTSQDFHDAWFAGFSPDIV | |
| | | | | | | TVVWVGFDTPQTLGRNSDGG | |
| | | | | | | RVAGPIWNRIMKVALANRPK | |
| | | | | | | LDFRVPDGITLASYDTGRIS | |
| | | | | | | AVDGFKTDQVPGASVELHGF | |
| | | | | | | GAGTEALTAADTGADSVISD | |
| | | | | | | SESDMAQTPGQGGGMAGAAP | |
| | | | | | | GSGTAAAPGQAQKPAPSDGD | |
| | | | | | | IGVGGLY | |
| | GO_ | Prephenate | H | | Up | MTPLFRSLAVIGPGLIGSSV | 232 |
| | 2112GO_ | dehydrogenase | | | | LRRARETGAIAETLIAADSN | |
| | 2112 | (EC | | | | PGVLERVRELGIADITTSDP | |
| | | 1.3.1.12) | | | | AVAAQADCVMICVPVGAVEP | |
| | | | | | | VARQVLPFMKPGSILTDVAS | |
| | | | | | | VRGQLGPTLAAILPENVAYV | |
| | | | | | | PGHPMAGTEHSGPDAGFSTL | |
| | | | | | | FEDRWALLVPPEGADPKAVT | |
| | | | | | | TIGQLWTLCGARTKILSDEK | |
| | | | | | | HDRICAMVSHLPHLLAFTIC | |
| | | | | | | DTADNLSDEIRAAVLDYAAS | |
| | | | | | | GFRDFTRIAASDPVMWRDIF | |
| | | | | | | LANKEALLGTLDKFVADTQA | |
| | | | | | | MADAIRTGDEATITSKIERG | |
| | | | | | | RAIRRTLIENRQA | |
| | GO_ | Pyrroline-5- | H | | Up | MPSVPSVLLAGCGKMGGALL | 233 |
| | 2168GO_ | carboxylate | | | | DGWLASPTPPRLVILDRHRT | |
| | 2168 | reductase | | | | GTDDAITVVRTAAEIPAGFK | |
| | | (EC 1.5.1.2) | | | | PDVIVLAVKPATAEIMIDAI | |
| | | | | | | GKALGPRMSNAAILSVMAGR | |
| | | | | | | TCAALSEAAQLAGADMPVLR | |
| | | | | | | AMPNTPSAVGAGISGLYASP | |
| | | | | | | SATPEQKSICHDLLFAVGDV | |
| | | | | | | VPVEKEADLSIVTAISGSGP | |
| | | | | | | AYVFLLAELLEKAGQQHGLS | |
| | | | | | | PTIARRLARGTIYGAGRMLD | |
| | | | | | | DLPDSAEDLRKAVTSPNGTT | |
| | | | | | | AAALAVLMKSDAWPETVPKA | |
| | | | | | | IDAATKRADELAG | |
| GO_ | GO_ | Ribonuclease | H | | Up | MKLSHTEALASMQAALGHDF | 234 |
| 2617 | 2617 | III (EC | | | | KKPELLSEALTHRSAVSGRD | |
| | | 3.1.26.3) | | | | PRRARRNQRPKGSGSNERLE | |
| | | | | | | FIGDRVLGLLMAEWLLERYP | |
| | | | | | | DEQEGALGPRHAHLVSRTVL | |
| | | | | | | AEIADQVGLSASLQISPHEE | |
| | | | | | | DAGIRRLSSIRADAMEALLG | |
| | | | | | | ALYLDGGLEPARRVVRQYWQ | |
| | | | | | | SRIESADRPHKEPKTLLQEY | |
| | | | | | | MLSQGLPLPHYELLSSDGPS | |
| | | | | | | HAPVFRVSVTTMGHTGTGEA | |
| | | | | | | GSKRLAESAAATALLKHLGO | |
| | | | | | | NVAS | |
| GO_ | GO_ | Sugar phosphate | H | | Up | MRDFTHDHSALALNTATLGH | 235 |
| 493 | 493 | isomerases/ | | | | NMLGAGAGWSAERTIDACAE | |
| | | epimerase | | | | RGIGGIVFWRPELQGRASAI | |
| | | | | | | GQHARQVGVEVVGLCRSPFL | |
| | | | | | | VGPLAPHGRQAVVDDFRRSI | |
| | | | | | | DETADLGGKILTIVVGGVEP | |
| | | | | | | GTKGVRESLDIVTDRLSEVL | |
| | | | | | | DYASERDVKLALEPLHPMYG | |
| | | | | | | GDRSCLPTVRDALDICDALN | |
| | | | | | | SDTLGVAVDVYHVWWDTDLP | |
| | | | | | | RQLERAGTRIMGFHLCDWLV | |
| | | | | | | PTTDFLLDRGMMGDGVADLK | |
| | | | | | | GLRAGVERAGYDGFCEVEIF | |
| | | | | | | SANNWWKRDPAEVLDVIIQR | |
| | | | | | | FRDIC | |
| GO_ | GO_ | TonB-dependent | H | | Up | MTTSVQHSLKRRTPAPRTVI | 236 |
| 2343 | 2343 | outer membrane | | | | RMFLMAGISYSVLPSFGAHA | |
| | | receptor | | | | QTTDATKHAAVHKTAAKKKT | |
| | | | | | | AAKQQVMPAAKNTPATTPVA | |
| | | | | | | AAAPAAKPATTTSVQTSNRT | |
| | | | | | | TLTTDPTPVAETVTVTGTRL | |
| | | | | | | SQTRLTNVMAGTTVDAEQLR | |
| | | | | | | ARGYTDLGLALLRENTAFTV | |
| | | | | | | GDNSPIGSQGSFGAGQSFIA | |
| | | | | | | LLGLGSQRTLTLIDGMRMVG | |
| | | | | | | GSTASNYGAGSGSQVDVSTI | |
| | | | | | | PTSLIKKIDTKLGGAGAAYG | |
| | | | | | | ADAVAGVVNYQLDDHFKGVD | |
| | | | | | | FNAQGNWTQKLDAPQEKITF | |
| | | | | | | KAGTSFDHDKGGVVFDVEYR | |
| | | | | | | NSGGMVANDRRYLTGDQATT | |
| | | | | | | YARAPVGSTSPYSYVLTPAV | |
| | | | | | | RFLQNSVTGVPMTSAAYGSL | |
| | | | | | | PLTYGQASQYGIANASGAGL | |
| | | | | | | MFSQDGKSLVPITTNAALKD | |
| | | | | | | GLRGSGGNGLALTDYNQLYA | |
| | | | | | | PSSKLNLTTLGHYDFTDHLH | |
| | | | | | | ATWQGWYARGTASSLTAQGT | |
| | | | | | | WNTPQFDDPLSAESYQQDTV | |
| | | | | | | VNGAYTLSTSNPYLTSAERT | |
| | | | | | | AIKSALAAAGQSTDTFYLSR | |
| | | | | | | LNQDLDAGNYTTTVQMFRFQ | |
| | | | | | | GGLNGDFDAVGRHFDWSVKG | |
| | | | | | | EYSKYMSDTWEPMIDTQNLV | |
| | | | | | | NALNATTDASGNIICTPGYT | |
| | | | | | | NSTAKTRSSTCSPLDPFGYD | |
| | | | | | | QMTLGAKNYITADAHSKESN | |
| | | | | | | VQRDIQAEIHSTVFRLPAGD | |
| | | | | | | IRWDLGYEHRREGYDFNPGS | |
| | | | | | | FMEGEEQADGTYKQYGNFTS | |
| | | | | | | IPYTGGAYHTHEVFGELDVP | |
| | | | | | | FVSPSMHIPGIYNLSATANG | |
| | | | | | | RYINNSVTGSYWTYMFGGAW | |
| | | | | | | WPTQDFGLSGNYAQSVRNPS | |
| | | | | | | VTELYSPTSTSYETANDPCS | |
| | | | | | | VEYISSGPNPATRAANCAKG | |
| | | | | | | GMAGGFESNINYYTLPGTTG | |
| | | | | | | GNRNLKNEVSKSFTGNLEIR | |
| | | | | | | PRFMKGFDFTGSFVDVKVNN | |
| | | | | | | EITSLDASDLMAACYDSTSY | |
| | | | | | | PSNAYCNAFTRDPSTHQVTS | |
| | | | | | | FTDGYFNIANQHMQVLQAKL | |
| | | | | | | DYYIPLRRFGLPSSAGNLEL | |
| | | | | | | QGNYTHYVKNQQTYLGSTYL | |
| | | | | | | LTGSTTSPNNLFTLDLNYTR | |
| | | | | | | GPLFVQWQTVYYGKSKYALQ | |
| | | | | | | VSDYTYQHNNRPDFAYFNTT | |
| | | | | | | IGYKITKNFDVNFMMNNITN | |
| | | | | | | ALPKYPGTVSLTRYYEAIMG | |
| | | | | | | RSFQMNLGAHF | |
| GO_ | GO_ | Tryptophan | H | | Up | MSRIQTRFAALKKEGRGALI | 237 |
| 2864 | 2864 | synthase | | | | PYLQACDPDYDTSLELLRAM | |
| | | alpha chain (EC | | | | PAAGADLIEIGVPFSDPSAD | |
| | | 4.2.1.20) | | | | GPTIQAAALRGLKAGATLGC | |
| | | | | | | VLEMVRAFRETDNETPIVLM | |
| | | | | | | GYLNPIDSYGPAEFCFDAAQ | |
| | | | | | | AGVDGIIVVDMPTEEADLLD | |
| | | | | | | AHAREAGLDIISLVAPTTSN | |
| | | | | | | SRLFHVLRDASGFVYYVSIT | |
| | | | | | | GITGTNSASAADLEKALPRI | |
| | | | | | | REATSLPVAVGFGISTPEQA | |
| | | | | | | RTASRIGDAAVVASALIKTM | |
| | | | | | | AGTLDDGRATERTVPAVLKQ | |
| | | | | | | LEGLAAAVRA | |
| GO_ | GO_ | Two-component | H | | Up | MVPNLSDPDLPARILVVEDD | 238 |
| 3253 | 3253 | transcriptional | | | | AGMRTLILRALQGGGFRARG | |
| | | responseregulator, | | | | VACGDEMWAALEVAPVDLII | |
| | | LuxR family | | | | MDIMLPGKSGIELCRALRSG | |
| | | | | | | QGATHENETPPAQVPIIMVS | |
| | | | | | | ARGEERDRVNGLESGADDYV | |
| | | | | | | PKPFGQRELLARVRAVLRRG | |
| | | | | | | IATGAPQERVRRETLRFAGW | |
| | | | | | | TLDLRRRELTDPSGATVDIS | |
| | | | | | | GAEHDLLTSFLDNPQRVIAR | |
| | | | | | | DRLLELSRTRLGDVSDRSID | |
| | | | | | | VLVSRLRRKLGSDADQLIRT | |
| | | | | | | VRGLGYIFVAEVERV | |
| GO_ | GO_ | Fructose- | L | F | Down | MSTAETMMSQMAEKGGFIAA | 239 |
| 1509 | 1509 | bisphosphate | | | | LDQSGGSTPGALKQYGIPES | |
| | | aldolase | | | | DYSGESEMFARMHEMRVRII | |
| | | class I | | | | TAPSFTGDKVIGAILFERTM | |
| | | (EC 4.1.2.13) | | | | DGDVKGEPVPAYLWRERGVV | |
| | | | | | | PFVKIDKGLEAEADGVQLMK | |
| | | | | | | PMPGLDDLLERAVKLGVYGT | |
| | | | | | | KERSTIRLPSESGIRAIVQQ | |
| | | | | | | QFAVAEQVRRHGLVPILEPE | |
| | | | | | | VLIKSPDKKACEQLLHDYVL | |
| | | | | | | EELQKLPEDARIMLKVTIPE | |
| | | | | | | VPDLYDDITRDPRMVRVVAL | |
| | | | | | | SGGYPLDQACEKLRHNHRMI | |
| | | | | | | ASFSRALIGDLRHQMDEAQF | |
| | | | | | | DATLGKTIDEIYDASVHKV | |
| GO_ | GO_ | Transport- | L | F | Down | MSGSTISSGQPTPDNTTTRP | 240 |
| 1829 | 1829 | related | | | | APLRPRARPFLSWLYAPSPS | |
| | | membrane protein | | | | SVTFALRNTIAACLAVGIAF | |
| | | | | | | WMELDDPAWAAMTVWAVAQT | |
| | | | | | | SRGESQSKAKWRIVGTISGA | |
| | | | | | | IAAITIMAAAPQAPWMFFPM | |
| | | | | | | IALWIGLCSGFATFVSNFRS | |
| | | | | | | YALVLAGYTCSIICMGAASN | |
| | | | | | | PDNVFMVAMSRGTYIVLGVL | |
| | | | | | | CEAFMGLIFATSQERHARAQ | |
| | | | | | | LRQKLESALVLVTTTLCSLL | |
| | | | | | | GEERGALNAARRQFGTILTI | |
| | | | | | | NDQIEFAEVEMGPHGHEGDH | |
| | | | | | | ARAALAAVSALLSRGFGMAM | |
| | | | | | | RLQVLNHNHPAFTKTADEIL | |
| | | | | | | AFLKQFPQRLPDQNAVPALL | |
| | | | | | | ADLQHFRDICRLYAAPHRES | |
| | | | | | | DIRPDLEPIPGLEPFDQTDE | |
| | | | | | | GQGMRADRLDERILFVSLGE | |
| | | | | | | LLGDLEQAIKEYEASTHRIK | |
| | | | | | | GDHFHFQLETHRDTREAVHN | |
| | | | | | | GLRGACAVLITAYIYEVTAW | |
| | | | | | | PNGLGFIAITTLVCGLFATK | |
| | | | | | | ENPVLGTTEFLKGAVAAYFM | |
| | | | | | | AWILVFVLMPKVTTFETLAL | |
| | | | | | | FLGPAMFLGGLAKGNPATAG | |
| | | | | | | GSAAYGLLLPAMLGLENHHV | |
| | | | | | | MNEIAFYNGNMATVLAVAVS | |
| | | | | | | VIVFRSVLPFSSDAERFRLR | |
| | | | | | | RIMLGELQRLAHPGFTPRIS | |
| | | | | | | VWIGRNTDRFARLIRHAGPT | |
| | | | | | | PAPLIEACILGTLATLTLGL | |
| | | | | | | NVIRLRTLLDREYLPESARR | |
| | | | | | | PILLVLHYVEQSTKRHDKAA | |
| | | | | | | RIAEAAVRRLRVLDAQETDL | |
| | | | | | | VTRLELTRAITYLVVIAYTM | |
| | | | | | | RTNEDFLDASKPFRGERNSR | |
| | | | | | | LLNSGQG | |
| GO_ | LepA | None (6 bp | L | F | Down | MTDTPLSLIRNFSIIAHIDH | 241 |
| 2805 | | upstream | | | | GKSTLADRLIQACGALTARE | |
| | | from Translation | | | | MKNQVLDSMELEQERGITIK | |
| | | elongation factor | | | | AQTVRLTYPAKDGKVYTLNL | |
| | | LepA) | | | | MDTPGHVDFAYEVSRSLAAC | |
| | | | | | | EGSLLVVDASQGVEAQTLAN | |
| | | | | | | VYQALDANHEIVPVLNKIDL | |
| | | | | | | PAAEPERVRAQIEDVVGIPA | |
| | | | | | | DDAVEISAKTGINIEGVLEA | |
| | | | | | | LVQRLPAPTGDAEAPLQALL | |
| | | | | | | VDSWYDAYLGVIILVRIKDG | |
| | | | | | | RLKRGDRIRMMQTGATYHVD | |
| | | | | | | QVGVFLPKMQSVESLGPGEM | |
| | | | | | | GYINAAIKTVADCNVGDTVT | |
| | | | | | | LDKRPAEKALPGFKPSIPVV | |
| | | | | | | WCGLFPIDADDFEKLRDSLG | |
| | | | | | | KLRLNDASFHFEAETSAALG | |
| | | | | | | FGFRCGFLGLLHLEIIQERL | |
| | | | | | | SREFNLDLIATAPSVVYKMH | |
| | | | | | | MTDGTSEDLHNPADMPELSK | |
| | | | | | | IETIEEPWIKATIMVQDEYL | |
| | | | | | | GPVLTLCSERRGIQVDLTYV | |
| | | | | | | GNRAMAVYRLPLNEVVFDFY | |
| | | | | | | DRLKSISRGYASFDYQMDGY | |
| | | | | | | EESDLVRISILVNHEPVDAL | |
| | | | | | | SFISHRTVAEQRGRSICAKL | |
| | | | | | | KDLIPKQLFKIAIQAAIGSK | |
| | | | | | | VIARETIGALSKDVTAKCYG | |
| | | | | | | GDISRKRKLLDKQKEGKKRM | |
| | | | | | | RQFGKVEIPQSAFLAALKMD | |
| GO_ | GO_ | Fructose- | L | F | Down | MSRVSPGVVSGASYTALIRA | 242 |
| 3252 | 3252 | bisphosphate | | | | CHEGGYALPAINVVGTDSVN | |
| | | aldolase | | | | AVLEAAARNGSDVIIQVSNG | |
| | | class II | | | | GARFYAGEGLPDAHRARVLG | |
| | | (EC 4.1.2.13) | | | | AASMARHVHLLAKEYGIAVI | |
| | | | | | | LHTDHADRKLIPWLDDLITM | |
| | | | | | | SEDEFKATGKPLFTSHMLDL | |
| | | | | | | STEPLEENLATSASMLKRLA | |
| | | | | | | PLGMGLEIELGVTGGEEDGI | |
| | | | | | | GHDLEEGADNAHLYTQPEDV | |
| | | | | | | LKAWELLSPIGTVSIAASFG | |
| | | | | | | NVHGVYKPGNVQLRPEILKN | |
| | | | | | | SQEAVQKATQSGPKPLPLVF | |
| | | | | | | HGGSGSTIAEIDAAVSYGVF | |
| | | | | | | KMNLDTDIQFAFAHGVGSYV | |
| | | | | | | LEHPVAFQHQIDPGTDKPMK | |
| | | | | | | SLYDPRKWLRVGEKSIVERL | |
| | | | | | | DEAFEILGSKGRSVARKS | |
| GO_ | GO_ | Transcriptional | L | F | Down | MSQTIVPHTLPLKNVHVPAR | 243 |
| 1025 | acrR | regulator, AcrR | | | | DRTATRAPGRPVNLRLKDNI | |
| | | family | | | | LAAIAQVLVEEGYQGLTISR | |
| | | | | | | VAKAAGVSTATVYRRWPTKQ | |
| | | | | | | AMFFDAMRLWRDDLTPQIDT | |
| | | | | | | GSFAGDVDELIAARIRFLVT | |
| | | | | | | PLGRTYGTLLGEAVHDPEFG | |
| | | | | | | QVLWEVSVVPARAQMTLFLE | |
| | | | | | | RASRRGEKVFCQNPDTVLDM | |
| | | | | | | LLSTIHFRAMNLLGREPMDA | |
| | | | | | | DSTLKEIRSLARSLIAG | |
| GO_ | GO_ | MBL-fold | L | S | Both | MHDAAVQAATGQIRRTEEGT | 244 |
| 1035 | 1035 | metallo- | | | | APAPVVCTFFDEATNTASHV | |
| | | hydrolase | | | | VHCPVTKRAAVIDSVLDYDA | |
| | | superfamily | | | | AAGRTSHGSAQAIVDYVERE | |
| | | | | | | GLTVDWQLETHAHADHLSAA | |
| | | | | | | PWLQEKIGGKLGIGADITRV | |
| | | | | | | QAVFGKIFNAGTRFARDGSQ | |
| | | | | | | FDHLFTDGETFRIGDLPVTV | |
| | | | | | | LHVPGHTPADMAFVIGNAAF | |
| | | | | | | VGDTIFMPDFGTARADFPGG | |
| | | | | | | DPRQLFRSIRRLLSLPVETR | |
| | | | | | | LFLCHDYKAPGRDEYAWLTT | |
| | | | | | | VGHERDYNIHVHDGVSEEEF | |
| | | | | | | VKMRTERDATLAMPRLLMPS | |
| | | | | | | VQVNMRGGHLPEPEADGVSY | |
| | | | | | | IKIPVNRV | |
| GO_ | lipB | Octanoate-[acy1- | L | S | Both | MPKTRAMTRNEIYEEILWKS | 245 |
| 1921 | | carrier-protein]- | | | | SPGLTAYPEALTFMEERARA | |
| | | protein-N- | | | | IHQGTAAPLVWLVEHPPVFT | |
| | | octanoy | | | | AGTSARDTDLYNPHGYPTYS | |
| | | ltransferase | | | | AGRGGQWTYHGPGQRLGYVM | |
| | | EC 2.3.1.181) | | | | MDLTKPNGTVPPRDLRAFVA | |
| | | | | | | GLEGWMTGALAQLGVTAFTR | |
| | | | | | | EGRIGVWTIDPLTGLEAKIG | |
| | | | | | | ALGIRVSRWVSWHGVSINVS | |
| | | | | | | PDLTDFDGIVPCGIREFGVT | |
| | | | | | | SLQRFDSSLTMADLDDALAA | |
| | | | | | | AWPGRFGSIPRAA | |
| GO_ | elf-2B | Nucleoside- | L | | Down | MIVIPMAGLSSRFTKAGYTK | 246 |
| 1731 | | diphosphate-sugar | | | | PKYMLPLAGKSVFAHSIESF | |
| | | pyrophosphorylase | | | | SAYFGLIPFVFIARPVADTE | |
| | | involved in | | | | AFIRKETAKLGIKDVRIIIL | |
| | | lipopolysaccharide | | | | DHETAGQAETVELGVRKAGL | |
| | | biosynthesis | | | | GLETPLTIFNIDTFRKNFRF | |
| | | /translation | | | | PDEPWFKKSDGYLEVFKGEG | |
| | | initiation | | | | ANWSYVGPEENSNEPLVART | |
| | | factor | | | | TEKKPISDLCCDGLYHFAHT | |
| | | 2B, gamma/epsilon | | | | RDFLDALTQERLTPSASELY | |
| | | subunits(eIF- | | | | IAPLYNYLIKAGRKIHYNLL | |
| | | 2Bgamma/eIF- | | | | PADMITFCGVPAEYTALLNA | |
| | | 2Bepsilon) | | | | IED | |
| GO_ | GO_ | Transcriptional | L | | Down | MTTDAEQDGPLRQRKKDRTH | 247 |
| 1683 | 1683 | regulator, AcrR | | | | AALVREAMRLFSTHGYEETS | |
| | | family | | | | VDEIAEAAQISRRTLFRYFP | |
| | | | | | | GKADIILAWTGSVTTILTEA | |
| | | | | | | IRDVPLDVPLQDAVLAGLVP | |
| | | | | | | VVACYSSDRMDAYAVVRLVE | |
| | | | | | | RTPALRDMALRRYSEWEETL | |
| | | | | | | ASALIARLPATEMPSLVARL | |
| | | | | | | LARTAIATFRTALDEWMKTE | |
| | | | | | | GKSDLEAILRQTFTLQPLLW | |
| | | | | | | QDDFPLSSG | |
| GO_ | bamE | Outer membrane | L | | Down | MNNASSPTPQSRTRLLRRFA | 248 |
| 1849 | | beta- | | | | QAGVACVPLLLGGCSFFSPI | |
| | | barrel assembly | | | | PEPRGSLIEKTDYAQLVPGT | |
| | | protein BamE | | | | STRTDVLDLLGSPTAHATFD | |
| | | | | | | DNTWIYVSMITSPTPLTFPS | |
| | | | | | | VKKQQVVVLNFDNGGVLRKM | |
| | | | | | | DTLNKKNAMYVGMVGAKTPT | |
| | | | | | | PGTSSSILQELLGNVGRYNP | |
| | | | | | | MSGMSSQFGGSTGPMGGQGT | |
| | | | | | | GNGGAGNTLP | |
| GO_ | envZ | Osmolarity | L | | Down | MRERDDAWQKLDRPLRRILP | 249 |
| 1848 | | sensor | | | | RSLMGRSMLIVLIPLLVTQA | |
| | | protein EnvZ (EC | | | | IALGLFYGTYLNVVSRRLSD | |
| | | 2.7.3. ) | | | | GVTGEVSLVIAMIEHTSSEA | |
| | | | | | | ERTLVLQDASSRTQLGFSFQ | |
| | | | | | | PGETLSRYGTNHVLGPMDDD | |
| | | | | | | FARSIRQNLGRPYDVDWSES | |
| | | | | | | PQTVRASIQLPQGVMVVMVP | |
| | | | | | | VKRLNIGPIWLFVVWAVSSS | |
| | | | | | | IVLFLIAGLFMRNQVRAIRR | |
| | | | | | | LGHAAELFGMGRDQGPIRPQ | |
| | | | | | | GAREVRQAAIAFNRMQARVN | |
| | | | | | | RFVAQRTAVLAGVSHDLRTP | |
| | | | | | | LTRLRLTVAMFPTFGPIRAE | |
| | | | | | | TLKPDLADMVADIEDMERLI | |
| | | | | | | GSYLSFARGEGAEEPVLTDL | |
| | | | | | | RGMLDDVAAATVRAGGQVLG | |
| | | | | | | VEGREGVEATVRPDALRRVL | |
| | | | | | | TNLAENARRHGGAMRFSLRE | |
| | | | | | | GERNVEITVEDNGPGLSASR | |
| | | | | | | RAAISELNGTTASQDGNSGL | |
| | | | | | | GLTIVRDIIHAHGGSIRLVE | |
| | | | | | | SPLGGLGVVLSLPK | |
| GO_ | ggt1 | Gamma- | L | | Down | MAHRQHQISTPDATQARRVS | 250 |
| 1517 | | glutamyl | | | | SRLPASLMASVASGLLLGAC | |
| | | transpeptidase (EC | | | | SWIPGSHLVGISETSAPAGG | |
| | | 2.3.2.2) | | | | SIGTVVADEPQAALVGHDVL | |
| | | Glutathione | | | | ARGGNAADAATATALALGVT | |
| | | hydrolase (EC | | | | LPSRASFGGGGACLVSRPGE | |
| | | 3.4.19.13) | | | | VAQSIAFQPRAGTSKGADRP | |
| | | | | | | AATPADFRGLYLMQLHYGTV | |
| | | | | | | DFNDLIAPALNLASTGITVS | |
| | | | | | | RTLAADLAAVRPALLADDSA | |
| | | | | | | RAIFGRGDASTLVAGDSLAQ | |
| | | | | | | PRLAGFLERIRVAGVGDLYN | |
| | | | | | | GALADVYVTAAQKAGGGLND | |
| | | | | | | DDMRQTLPLQTEALITRQGG | |
| | | | | | | VDASFLAPPADGGLGAAVRY | |
| | | | | | | TTGASAQGTVAAWRASGNTS | |
| | | | | | | LAAAQAALNSGRSGGGSLPA | |
| | | | | | | LPASTSFVVTDHSGMAVACV | |
| | | | | | | LSDNNLFGTGRIAGSTGVVL | |
| | | | | | | GASPAHTPQPLLSAAVLRDQ | |
| | | | | | | RNLRAVIAASGQNEAADAVG | |
| | | | | | | DAARAAAHETPIPHEGAGRI | |
| | | | | | | NAILCHGNDSCRGSTDPRAA | |
| | | | | | | GLAAGTTNDSRN | |
| GO_ | GO_ | Putative outer | L | | Down | MLNDNLPHFDGRHYRNPEAW | 251 |
| 1348 | 1348 | membrane | | | | RPDETRTARTTSQRIGNIFR | |
| | | protein | | | | WQMGLRPRWPDALPPQKSWP | |
| | | | | | | QVTPAPGECCVTFIGHATVL | |
| | | | | | | LQFGRTGRAPLRIITDPVFS | |
| | | | | | | ERCSPFRSFGPRRVRPPGIP | |
| | | | | | | LDALPRIDIILVSHCHYDHL | |
| | | | | | | DLPSLRALAERDDPLCLSLP | |
| | | | | | | GNRRHLEKADLPRIAELDWW | |
| | | | | | | ESTTDDGARITATPALHGSA | |
| | | | | | | RTPFDSNRALWGGFTIEADG | |
| | | | | | | HTVFFAGDTAWGKHFDAIHR | |
| | | | | | | RWPDINLAILPIGAYDPRDL | |
| | | | | | | MRRVHMSPEEALMAFDTLRA | |
| | | | | | | KQGLPIHFGTFQLTDEAILE | |
| | | | | | | PPTRLEFASRPGSRPFAALE | |
| | | | | | | NGESLTLPPADTKS | |
| GO_ | GO_ | hypothetical | L | | Down | MGIAGASCVLDVMINDRSAL | 252 |
| 1415 | 1415 | protein | | | | VRDSAAFIVLLERIWKARDV | |
| | | | | | | EASLVWSELDERIRLADELR | |
| | | | | | | ASGIRPYKGGRFRSTKLP | |
| GO_ | GO_ | Glycosyl | L | | Down | MQHPVLTILPPRERYEEGHA | 253 |
| 1438 | 1438 | transferase, | | | | GAISLLVSREAQFSDVVAGM | |
| | | group 1 | | | | GRIGTPLPGGQYRPLILPRV | |
| | | | | | | PLLRNWRLRLACVAMMRFCR | |
| | | | | | | PALTEIHNRPDLARFLARFG | |
| | | | | | | PVRLILHNDPCTMRGARSPR | |
| | | | | | | QREDLARHVLVCGVSEWVTG | |
| | | | | | | RFCEGCGPIRTEVQPNCIDL | |
| | | | | | | SVLPTVGLRQKIVLFAGRVV | |
| | | | | | | ADKGVDAFVRAWGAIRAQYP | |
| | | | | | | GWRAVIMGADRFGPDSPETP | |
| | | | | | | FLEKLRPQAAAVGIMMTGYR | |
| | | | | | | PHDDVLEAMAGAAVVVVPSR | |
| | | | | | | WEEPFGMTALEAMGCGAAVV | |
| | | | | | | ASPVGALPDLVGDAALLAAP | |
| | | | | | | DEAGALEQALSRLMGDEGLR | |
| | | | | | | TRLGERGRERAALFDVAAAR | |
| | | | | | | VRQEELRRAAIAFARRPPRL | |
| GO_ | GO_ | Two-component | L | | Down | MHIVPRSLVARTSLLLIVGL | 254 |
| 1455 | 1455 | system sensor | | | | AVVEAAGLGIHALDRFDLEE | |
| | | histidine | | | | RSQVHEEQVQVFSIYRTVAE | |
| | | kinase | | | | AKPADRHDAIDDLHVPSNVT | |
| | | | | | | VLLLKEPDPLIEGHEIPFPA | |
| | | | | | | MTSPSFLHRLHEDPQGHEGF | |
| | | | | | | LPPGPMDPGGPHPGPDMGGP | |
| | | | | | | GFPGAGPGPMGPMGGGPGGP | |
| | | | | | | EFHFPADHADGERADAEHLN | |
| | | | | | | GDPRFPGAIRRRDMPPFMRW | |
| | | | | | | ALLPSSLYPRKVLIGQKMRT | |
| | | | | | | HSTSILLPDRDCWLVVRFVT | |
| | | | | | | PLPNPFGSPTFMIAFLVMSI | |
| | | | | | | AGSAMIVWATQRLIAPVTTL | |
| | | | | | | ANAAEALGRDVHTAALPENG | |
| | | | | | | PSEIRRAAIAFNTMAMRIRR | |
| | | | | | | FVTDRTLMLTAIGHDLRTPI | |
| | | | | | | TRLKLRAEFIDDEELRNKVL | |
| | | | | | | ADLDEMESMVSATLAFGRDS | |
| | | | | | | ASAEPIVSLDLRALLQTIMD | |
| | | | | | | EAAESVPDKADDLFYEPPNV | |
| | | | | | | PVRIKARSVALKRALNNLIL | |
| | | | | | | NALKYGGSAHVTLIPATNPG | |
| | | | | | | EKDNVVKILIEDNGPGLPES | |
| | | | | | | ELDRVFEPFVRIESSRNRET | |
| | | | | | | GGSGLGLSIARTILHGQGGN | |
| | | | | | | VRLENRPSGGLRVIVTLAP | |
| GO_ | GO_ | hypothetical | L | | Down | MPPRDRRTRPTVDRRRALVG | 255 |
| 1728 | 1728 | protein | | | | LGLAAPFLASRSIAAEKSVP | |
| | | | | | | CLRIDEVELRRFGAALDGIT | |
| | | | | | | DDLHVLQACIDSSGVNTPDV | |
| | | | | | | PCPSILFDFPAVTVCLSGPI | |
| | | | | | | VTGGRNITLRGAGQDLTVLI | |
| | | | | | | MKTGASGILTHGTSEYPAEG | |
| | | | | | | YLQLQDIGFDDGNIKGSGCT | |
| | | | | | | GISVHFAPGAPQAAMTWQGV | |
| | | | | | | ALRKWSQAATITNCPRNWHC | |
| | | | | | | ENVTVFGPDFTMQDDAGFRI | |
| | | | | | | ISEPHFAQGCFTYVFINVLV | |
| | | | | | | ANYSWGWDYSISAPLEGQRF | |
| | | | | | | YSCTCYNGWGMVRSRVHATP | |
| | | | | | | DQQSGIDETYRSVIWYFMEC | |
| | | | | | | DWQGFGYALDLVHCRNIIVR | |
| | | | | | | GGFYIANRNVDHLPIPEGRV | |
| | | | | | | RRRYMSFVDCGDILLDGVKF | |
| | | | | | | DVFTGSEPDLALIYVDGRSD | |
| | | | | | | NFRARDTNILSYAPIYCAFE | |
| | | | | | | FADPSHPNLKRNTLSEIDTL | |
| | | | | | | WASWSGGEKVRDAGGNQITQ | |
| | | | | | | TSVRDLGGDMTSGGRISFQG | |
| | | | | | | HVTLSRGKSMIAFPHRQNGN | |
| | | | | | | SWFSKTPIVFLQTEGTEDVP | |
| | | | | | | KLLNVTSDGISIEVTSNSAA | |
| | | | | | | IMWQATGT | |
| GO_ | GO_ | Transcription- | L | | Down | MEQNETMTREMSTASVGRSF | 256 |
| 1912 | 1912 | repair | | | | GPTVWGVPDGSVAFLLRQRL | |
| | | coupling | | | | AEHDGPLLHVARDDAAVAAL | |
| | | factor | | | | ADMLAWLMPEVEVLRLPAWD | |
| | | | | | | CLPYDRVSPNPVLIAERAGT | |
| | | | | | | LCRLLEPTKARRIVLTTVHS | |
| | | | | | | LIQRVPPRSAFRGQSISVKT | |
| | | | | | | GESLDQAMLIELLIANGYTR | |
| | | | | | | TDTVMEAGEFATRGGIFDLF | |
| | | | | | | PAGESDPIRLDLFGDEVENI | |
| | | | | | | RAFDVGTQRSTETLKRFELR | |
| | | | | | | PVSEFSLGPDSISRFRTGWR | |
| | | | | | | DSFGPAATSDTIYENVSDGR | |
| | | | | | | RYPGLEHYLPLFHDGDGHQM | |
| | | | | | | ETLLDYLPGGAVSFDHHAPE | |
| | | | | | | ILKARLDMIADHYQARRVPT | |
| | | | | | | REGEIPYRPLPPHRLYLDAH | |
| | | | | | | GWESMLADVPSVILNAFAMP | |
| | | | | | | DTAQGVDAGYRPGPLFARAK | |
| | | | | | | DGSRAGMFEAFGQQVKTWAE | |
| | | | | | | AGRRTYVTAWSRGSRERISH | |
| | | | | | | LLAEHGVTATSYEDWPDAAG | |
| | | | | | | MPKGTTGLLTLGLERGFVSD | |
| | | | | | | RLCFVSEQDLLGERISRPPR | |
| | | | | | | RRKRGEQFISQVGEIAEGDL | |
| | | | | | | VVHSDYGIGRYVGLETVVEG | |
| | | | | | | RVAHDYLSILYDGEQRLLLP | |
| | | | | | | VENIELLSRFGSEQAGVQLD | |
| | | | | | | KLGGTAWQARKAKMKSRIRV | |
| | | | | | | MAGELIKTAAARALKDAPTL | |
| | | | | | | APAEGLWDEFCARFPFVETE | |
| | | | | | | DQSRAIADVLEDMSAGRPMD | |
| | | | | | | RLVCGDVGFGKTEVALRAAF | |
| | | | | | | VAALSGMQVAVVVPTTLLAR | |
| | | | | | | QHFRSFSTRFEGFPVNVAQL | |
| | | | | | | SRLITPKEATKVREGMADGT | |
| | | | | | | VDIVVGTHALLAKTVSFERL | |
| | | | | | | GLLIIDEEQHFGVAHKERLK | |
| | | | | | | ALREDVHVLTLSATPLPRTL | |
| | | | | | | QLSLSGVREMSLIATPPTDR | |
| | | | | | | LAVRTFITPFDSVMIREAIQ | |
| | | | | | | RERFRGGQIFCVVPRLADMD | |
| | | | | | | RMAERLTEIVPDAKTVQAHG | |
| | | | | | | RLTPTELERVMTEFADGKYD | |
| | | | | | | ILLSTNIVESGLDMPSVNTI | |
| | | | | | | IIHRADMFGLGQLYQLRGRV | |
| | | | | | | GRGKQRGYAYLTWPQTRPLS | |
| | | | | | | PSSEKRLEVMQTLDSLGAGF | |
| | | | | | | TLASHDLDLRGAGNLLGDEQ | |
| | | | | | | SGHIKEVGIELYQQMLEDAV | |
| | | | | | | IDMRRERGKRQDDEDSWTPT | |
| | | | | | | IILGLPVLIPEAYVPDLPVR | |
| | | | | | | LGLYRRIASLTNEAEVEAMR | |
| | | | | | | AELVDRFGSLPPEVGNLLDV | |
| | | | | | | VLIKRLCREAGVERLETGPK | |
| | | | | | | GMVIQFRRNRFANPAALIDW | |
| | | | | | | VARKKESGVKIRPDHKLAVI | |
| | | | | | | REMTNATRIGYAKKVTTVLC | |
| | | | | | | KMIRKLEAAKSGD | |
| GO_ | GO_ | Xanthine | L | | Down | MTAAAQFSPLPQWPLYGLTD | 257 |
| 192 | 192 | and CO | | | | DLFPTLERWSAEGKRAALAT | |
| | | dehydrogenases | | | | LVSITGSSPRPLGSEMAICE | |
| | | maturation | | | | DGEVQGYVSGGCVEAAVRAE | |
| | | factor, | | | | ALESLKDGQPRMLDYGAGSP | |
| | | XdhC/CoxF | | | | VLDIQLTCGGRIGIFVRALP | |
| | | family | | | | DLTAHVATLKAARENRRPIT | |
| | | | | | | LLTDLDTGAMQFCPEARATG | |
| | | | | | | LEGRTFARQYLPPLRLILSG | |
| | | | | | | GDPITLALLSLSALMGLETT | |
| | | | | | | LLRPYGPPGPPPGLSPTRYI | |
| | | | | | | RGSLDAALPTLSLDRWTAVY | |
| | | | | | | SLTHDAFADLTLTAHALKSE | |
| | | | | | | AFCVSILGSRRKIPGRLEAL | |
| | | | | | | RTAGVPEEAFSRLHLPAGLE | |
| | | | | | | IGARTPMEIALSILTQMITT | |
| | | | | | | RPR | |
| GO_ | GO_ | hypothetical | L | | Down | MKKEKSAIVLFVKDEAHDIM | 258 |
| 2170 | 2170 | protein | | | | AWLSWHISLGFDKIFVYDDH | |
| | | | | | | STDGTYEIAKSCEGIYNVEV | |
| | | | | | | CRTSMLEGNFYYRQRDSYFD | |
| | | | | | | AIKKSIDHYEWIAMLDGDEY | |
| | | | | | | VSIDGTQDINGFLDKFRKDD | |
| | | | | | | TGIALSWCIYGSSSRVLKDK | |
| | | | | | | VPTYQVFNHRSTPELNDNTL | |
| | | | | | | VKSFVRPEAVSFVYENPHKF | |
| | | | | | | NLSYGNYADAAGQPVEWRPG | |
| | | | | | | ATKNILWEGARINHYICRSM | |
| | | | | | | EHFIDCIKRRLGSDLSNSTV | |
| | | | | | | YWSHFDRNDVYDPQDQARIN | |
| | | | | | | AANTVYNNIKKSVFQYSMKN | |
| | | | | | | FLEKGNALENTENSLTPHRK | |
| | | | | | | VDLFHLKSIHGEYLSLNNID | |
| | | | | | | GHLFQGEGFERILAAIPYDS | |
| | | | | | | NKIWLFRNPFVYSSNVRFHI | |
| | | | | | | SHSAQSNYCYEFAFDSNESD | |
| | | | | | | GSIFIQSPKTQKYLTCIPVG | |
| | | | | | | HGGSVEFSREEASDWEKFYF | |
| | | | | | | GEKVSELTFVGDNEGPASDL | |
| | | | | | | IYYMLNSAGSFPYEEFLLKS | |
| | | | | | | STLESNDRMNLKSLLGPQIM | |
| | | | | | | SII | |
| GO_ | GO_ | Glycosyl | L | | Down | MRDDPRETLTESYRSAARLN | 259 |
| 2173 | 2173 | transferase | | | | GLRAEHLQKENQKLLRQLFL | |
| | | | | | | IQTSLSWRVTLPLRAVRALT | |
| | | | | | | FGRLLSGRPVSELPGRFLRL | |
| | | | | | | WGREGLAGIRKTVIHRVRRL | |
| | | | | | | KRIHGDRQKVSTASTAETGG | |
| | | | | | | LHPYRATPECGAARLKPQVL | |
| | | | | | | IIAELSLRQCAKYRVWQKRD | |
| | | | | | | FLQTLGWSVQVVDWRDLAEA | |
| | | | | | | QSALQLCTHVIFYRVPGFDD | |
| | | | | | | VMKLVQEAHRLGLAPRWEVD | |
| | | | | | | DLIFDEGEYRQNGNIDTLPA | |
| | | | | | | AERDLLLSGVALFRRCMLAC | |
| | | | | | | GRGIASTAALAGAMREAGLT | |
| | | | | | | DVAVLENALDAQTLGIAEVL | |
| | | | | | | PLPVPSGRIWVSYGSGTNTH | |
| | | | | | | DADFRQAEAGLLAAMDEEPR | |
| | | | | | | LCLRVIGQLQLSSAFSRFGD | |
| | | | | | | RVERLTELTYPDYLKALSQT | |
| | | | | | | DIAIAPLEKTLFNDCKSNIK | |
| | | | | | | FLEAAIVRVAAICSPCAAFL | |
| | | | | | | TVLRDGKNGLLAADTAAWRN | |
| | | | | | | GFLALARDGDYRKRLAEAAY | |
| | | | | | | KDVMARYAPKAMAQTQARAL | |
| | | | | | | FGLPPSREAEGLRILMANVY | |
| | | | | | | FAPRSFGGATIVAEEMGRRL | |
| | | | | | | VRKGVQVSVMTSRPPAVDIP | |
| | | | | | | DGDVRYDVDGMMVFASVLPD | |
| | | | | | | GLDGVGHLDNPAMASRFADM | |
| | | | | | | LDACQPDVVHVHAAQGLGTG | |
| | | | | | | ILRICQERGIPYVLTLHDAW | |
| | | | | | | WLCERQFMVKGDGRYCFQTT | |
| | | | | | | IDPAVCQACVPGVRHLADRT | |
| | | | | | | VVMRQALAGAALLISPSHAH | |
| | | | | | | RELYLANGIAPERIVVNRNG | |
| | | | | | | FCWPKRARRPRSPGTPLRFG | |
| | | | | | | FVGGTEAVKGYGLLKEAMQS | |
| | | | | | | LSRSDWELVVVDNKLNLGFQ | |
| | | | | | | SIFPEDWTVRGKLRVVPAYT | |
| | | | | | | QASLDDFYDQIDVLLFPSQW | |
| | | | | | | KESYGLTVREALARDVWVVT | |
| | | | | | | TSPGGQSEDVVDGVNGTWLP | |
| | | | | | | LDGKPQTLVQAVSALLEAPE | |
| | | | | | | RFEGYVNPYKEQLATYDMQA | |
| | | | | | | DELYGFLKRAAGQPSGRGAG | |
| | | | | | | L | |
| GO_ | GO_ | hypothetical | L | | Down | MDLLRWTIAFLILALCAAVL | 260 |
| 2178 | 2178 | protein | | | | GFGGISADFAYIGKILFFIF | |
| | | | | | | LVLLIISLIFGRGRGTRL | |
| GO_ | GO_ | Uricase | L | | Down | MTQDSYPRDMIGYGRTPPDP | 261 |
| 2386 | 2386 | (urate | | | | KWPNGARIAVQFVINYEEGA | |
| | | oxidase) (EC | | | | ENSVLHGDAGSEAFLSEMVG | |
| | | 1.7.3.3) | | | | TKSIIGARCAQMESLYEYGS | |
| | | | | | | RAGFWRLRRLFDEAGMPVTV | |
| | | | | | | FGVAKALARNPDAVAAMKES | |
| | | | | | | GWEIASHGLRWIDYQDFPED | |
| | | | | | | LERAHIRKAIALHTEVTGER | |
| | | | | | | PLGWYQGRTSPNTARLVAEE | |
| | | | | | | GGFVYDADSYADDLPYYDRS | |
| | | | | | | NGRAQLIVPYTLDANDMKFA | |
| | | | | | | ALNGFTEGEQFFIYLRDAFD | |
| | | | | | | MLYREGGRMMSVGLHCRLAG | |
| | | | | | | KPARAMGLLKFLEHIRKHED | |
| | | | | | | VWVATRLDIARHWLSVHPA | |
| GO_ | GO_ | Uncharacterized | L | | Down | MMSRIQLTVLRPLHRPTTRL | 262 |
| 2634 | 2634 | protein | | | | ALGFLALGALAACGSGRDPS | |
| | | CC_3748 | | | | TLTAPRNHLLGVDRGAEGGA | |
| | | | | | | DELRGGVNAYLWRGAIDTLS | |
| | | | | | | FMPLASADAVGGVILTDWYQ | |
| | | | | | | PSASQNERFKIAAYVLDRRL | |
| | | | | | | RSDALRVSVFRQVLQDGQWE | |
| | | | | | | DTPVSATTTSDITTRILTRA | |
| | | | | | | RQLRAENGERDN | |
| GO_ | GO_ | Type II | L | | Down | MSGEFPVDQILRGECIETMK | 263 |
| 2698 | 2698 | restriction | | | | TLPDGSVDCIFADPPYNLQL | |
| | | adenine- | | | | RGELRRPDETVVDGVDDDWD | |
| | | specific | | | | KFADYATYDNFTREWLSEAR | |
| | | methylase | | | | RILHKDGTIWVIGSYHNVFR | |
| | | (EC 2.1.1.72) | | | | LGAIMQDLGFWILNDIVWRK | |
| | | | | | | SNPMPNFRGRRFTNAHETLI | |
| | | | | | | WAARGPQSKYRFNYQAMKAL | |
| | | | | | | NDDLQMRSDWYLPLCTGNER | |
| | | | | | | LKNEHGLKLHPTQKPESLLH | |
| | | | | | | RVLVASTNANDVVLDPFCGS | |
| | | | | | | GTTPAMAKRLGRHYIAIERH | |
| | | | | | | PDYVKAARERVAREERLTSE | |
| | | | | | | QLATTPAKREMPRIPFGSFV | |
| | | | | | | ETGVLPAGTLLYDRQKRLKA | |
| | | | | | | TVTPDGTLVSGNQRGSIHKL | |
| | | | | | | GAMLTNAPSCNGWTFWYFER | |
| | | | | | | DGQYVQIDVLRQESQALRNV | |
| | | | | | | G | |
| GO_ | GO_ | Two-component | L | | Down | MPLVTPNMPRVVLVEPDCDH | 264 |
| 2776 | 2776 | system sensor | | | | ARQIVQVLVKEGFALTCATS | |
| | | histidine | | | | GEEALGTIEETMPDLVVACT | |
| | | kinase | | | | ELPGMSGGQLARRLRLDALT | |
| | | | | | | RNIPILMLTEDASPGVEREG | |
| | | | | | | LESGADAYISKSAHPDLMVL | |
| | | | | | | RMRALLREGPELLQVDEASR | |
| | | | | | | LRRARIVIVNSPREDEDEEE | |
| | | | | | | VVEDVPETTLGELLWRDGHT | |
| | | | | | | VTSIERSDDLIEGGWLRGAD | |
| | | | | | | SPDCLVLELGSGDEDLKFCR | |
| | | | | | | LLDARRQAVLEAGGIPFRTL | |
| | | | | | | GIVEASRFRRQSSGEFFEAG | |
| | | | | | | IDDLVPSDIALEALAMRIRT | |
| | | | | | | LAQRRMAQDEFRQQEIERQQ | |
| | | | | | | NALTLEAARAKAEMAEALAQ | |
| | | | | | | ANMELARTNERLLQVQSKLV | |
| | | | | | | QTAKMASLGELVAGIAHEIN | |
| | | | | | | NPLAFTIAHADTVTRTLKRL | |
| | | | | | | QGVNASDEAMSLTKKGMSRL | |
| | | | | | | ESMKLGLQRIQNLVLSLRRF | |
| | | | | | | SRLDESSFQKVDVPAALETA | |
| | | | | | | LALLAHKLGPGIIVQKDLQA | |
| | | | | | | PAELVCQPAFLNQVVMNIIS | |
| | | | | | | NAADALADMSTDGDIVRGRI | |
| | | | | | | VIASRLENGRYEMRVSDDGP | |
| | | | | | | GLPPDLRTRIFDPFFTTKPV | |
| | | | | | | GTGTGLGLAIAYSVMEAHDG | |
| | | | | | | VIEVTDANLPDGRGIGACFR | |
| | | | | | | MSLPVRMTEEGPVATGRAA | |
| GO_ | GO_ | Oxidoreductase | L | | Down | MKLFELGERTAQVHDVLVTV | 265 |
| 2861 | 2861 | probably | | | | AELAERDDARAVLLESADDP | |
| | | involved in | | | | ALLKPYLNRLDLVVLRFPVF | |
| | | sulfitereduction | | | | RDGRGFTQARELREYLRFSG | |
| | | | | | | EIRAEGHILPDQAAFLRRCG | |
| | | | | | | VDSVVLPKDGNGDPALWEKQ | |
| | | | | | | LRQFPVAYQRSVLPERSVGP | |
| | | | | | | GLRVEEAS | |
| GO_ | GO_ | hypothetical | L | | Down | MTRIILQHGQNAPLTLDIEE | 266 |
| 3031 | 3031 | protein | | | | GSTTPIHLHFSQALPVAAPQ | |
| | | | | | | PEIAPVGPQAAPASKIRRFL | |
| | | | | | | PVAATAAVCAGLLFTFGGPR | |
| | | | | | | ASAPAMPESAPLPPLPSSGP | |
| | | | | | | LETQPQGPAPTAPQQILKAL | |
| | | | | | | HQPAHVEMPPSAPAQAGSPF | |
| | | | | | | GLEN | |
| GO_ | GO_ | hypothetical | L | | Down | MTQGVAEEMANSESQTPKAL | 267 |
| 967 | 967 | protein | | | | LAAVILMGVLIIAAVFGLIG | |
| | | | | | | VIAYRFLHPRPSVTATVPLA | |
| | | | | | | EGGFSRLALPLGAGEHITAV | |
| | | | | | | TSRPDGLMAVTLSGAGSDRV | |
| | | | | | | LLWNPEAGKIAAELDFGTPA | |
| | | | | | | QSTP | |
| GO_ | hII | Ribonuclease HII | L | | Down | MPDYALEAAHGGLVVGIDEV | 268 |
| 2697 | | (EC 3.1.26.4) | | | | GRGPLAGPVVASAVAFTAPP | |
| | | | | | | SETLSSLLDDSKKLTARRRM | |
| | | | | | | LAYEALMADEQALIGVGAAS | |
| | | | | | | VAEIERINIAQACYLAMRRA | |
| | | | | | | LSRLGCTPDLALVDGKHAPK | |
| | | | | | | LPCPIKMVIGGDGISLSIAA | |
| | | | | | | ASIIAKVTRDRLMARLAVRH | |
| | | | | | | DAYGWERNAGYGTAAHLQGL | |
| | | | | | | KLRGVTPHHRRGFAPIRNMI | |
| | | | | | | EAEAHAA | |
| GO_ | htrB | Lipid A | L | | Down | MTSFLYRAETLLVRALLAAI | 269 |
| 2440 | | biosynthesis | | | | RTLPPAASSSLGGFVARTVG | |
| | | lauroy1 | | | | PLLPVSKVADRNLQLALPEY | |
| | | acyltransferase | | | | DASARRRIVRDCWENLGSTV | |
| | | (EC 2.3.1.241) | | | | GEFPHISRLKQNTPSGAGWS | |
| | | | | | | VEGAEHLEAARASGRPVIFF | |
| | | | | | | SGHIGNWELMPPVVARYGMP | |
| | | | | | | FASFYRAASNPGVDRLIHRL | |
| | | | | | | RQDAMGQDVPMFPKGAKGAR | |
| | | | | | | AALKYLSKGGNLGVLGDQKM | |
| | | | | | | NDGIEARLFGRPAMTASAAA | |
| | | | | | | VFALRHDALIVTGHVRRDGP | |
| | | | | | | ARLVLVVDAPFMPTKTDDRA | |
| | | | | | | KDVLVLTQLFNDRLESWIRD | |
| | | | | | | IPGSWLWLHRRWDKSLYRNM | |
| | | | | | | TTQC | |
| GO_ | moeA | Molybdopterin | L | | Down | MSELLSVTRAMELVLDYAGS | 270 |
| 193 | | molybdenum | | | | FGTETVDLTMAAGRILRQTV | |
| | | transferase | | | | RAERAQPPYDRVMMDGIAFR | |
| | | (EC 2.10.1.1) | | | | HGSGPTLVSHGIQRAGASGQ | |
| | | | | | | VLPEGHVCLEVMTGAVLPDG | |
| | | | | | | ADTVVPVERLVREGRLIRFE | |
| | | | | | | EGYEPRKGQFIHRRGSDCAA | |
| | | | | | | GTELLAPGQRLDGPALAVLA | |
| | | | | | | GNGHAQVSVSRIPSIGIVAT | |
| | | | | | | GDELVDVSAPVRDWEIRRSN | |
| | | | | | | EYALTGAMLSRGFNCIERSV | |
| | | | | | | VPDDLAETVVALREQLSRHD | |
| | | | | | | VLILSGGVSMGAFDHVPKAL | |
| | | | | | | SKIGVERVFHKVAQRPGKPL | |
| | | | | | | WFGVGPEGQRVFGLPGNPVS | |
| | | | | | | ATTCGVRYVMPMLLAGQGLC | |
| | | | | | | RPEPYTVMLDAEADLIPTLT | |
| | | | | | | RFLPVKLRHDATGQALATPC | |
| | | | | | | PMPTSGDFSFLASTDGFMEL | |
| | | | | | | PRGEGVAPRGTAAMFHGW | |
| GO_ | nifS | Cysteine | L | | Down | MIYLDYLSTTPCDPAVVKAM | 271 |
| 85 | | desulfurase | | | | LPWFGEDFGNPHSPHGPGRK | |
| | | (EC 2.8.1.7) | | | | AAEAVERAREIVARLLGVEA | |
| | | | | | | REIVFTSGATEANNLAIKGA | |
| | | | | | | VRHLARVGDPRRRIVTLATE | |
| | | | | | | HKCVLESVRDLESEGFEAVV | |
| | | | | | | LGVDSEGRVDPEALRDALKV | |
| | | | | | | PTLLVSIMAANNETGVLQDI | |
| | | | | | | PQLAQIVKERDALMHVDLAQ | |
| | | | | | | MAGKMPVSLRNVDLASVSAH | |
| | | | | | | KMYGPKGIGALYVRRKPRVR | |
| | | | | | | LEPLFSGGGQERGLRSGTLA | |
| | | | | | | TPLVVGFGEAADLAAETMGD | |
| | | | | | | EAARQVFLRDDLWAQLREGL | |
| | | | | | | PGIVLNGAGAPRLAGALNVC | |
| | | | | | | LPEGCRALDVLEACPDVAAS | |
| | | | | | | TGSACTAAEIAPSYVLTAMG | |
| | | | | | | LSAEKASRCLRLSVGRFTSK | |
| | | | | | | ADIDRAASFLIAAARACHPN | |
| GO_ | oprB | Carbohydrate- | L | | Down | MGKFGQDWTKALLTACAMTA | 272 |
| 628 | | selective | | | | VLPGITAVGHAQTTPAGVVD | |
| | | porin OprB | | | | GHQKAAARTSTATMGTPQIR | |
| | | | | | | TKSISPVPLLVKPAPTKTGV | |
| | | | | | | ETAAKTSDTTESRFFPASFH | |
| | | | | | | DWLTQSTMTGDWGGWRTWLT | |
| | | | | | | DKGINIGGHYLEDSAGNPMG | |
| | | | | | | GKTKAVRYADEFGINVDFNL | |
| | | | | | | KKLTGLNLGMFHTLITARQG | |
| | | | | | | LGIGATLPALDSPQQIFGSG | |
| | | | | | | ETVRLTRLSWEMPWNKYVTT | |
| | | | | | | EVGEINTENDFEQSSVYWGM | |
| | | | | | | SQYCQFESNAICGMPQSIAM | |
| | | | | | | NSGYGWYPTAHPGAWVKFYP | |
| | | | | | | AGNDHYLVQFGAYSVDPVIS | |
| | | | | | | NTHNGWKLNLHDATGTYLPF | |
| | | | | | | QLGWHQGGKDDYSGPLQTNI | |
| | | | | | | KIGGYWDTSEVSDVYSHLGT | |
| | | | | | | FGVPAQYLISAPSEKVRGRF | |
| | | | | | | GGWFQFDRMLQRDEADPNRG | |
| | | | | | | TTLFTSFTWGDPRTSVAPYF | |
| | | | | | | ITWGVTRKGTFRSRPNDTIS | |
| | | | | | | IGMKMLWVNPKLTNWVRQIQ | |
| | | | | | | AAGGTDIYKPSGEHALELNY | |
| | | | | | | GWRPTPWLVIRPGAQYIWST | |
| | | | | | | GGTNRYKNPLLLDFETGITF | |
| GO_ | pdh1 | Pyruvate | L | | Down | MASLILMPALSPTMTEGTLA | 273 |
| 2072 | | dehydrogenase E1 | | | | RWVRKAGDTVAAGDVIAEIE | |
| | | component beta | | | | TDKATMEVEAVDEGVIGKTL | |
| | | subunit | | | | VDEGTQNIAVNTPIAVLLAE | |
| | | (EC 1.2.4.1) | | | | GEDASAADNVVRSSDPAVGA | |
| | | | | | | PVAIETPSDPAITEAPAVAQ | |
| | | | | | | AEDDRDWGETSEITVRQALR | |
| | | | | | | DAMAAELRRDEDVFLIGEEV | |
| | | | | | | AQYQGAYKISQGLLEEFGEK | |
| | | | | | | RVIDTPITEHGFTGMAVGAA | |
| | | | | | | LTGLKPIVEFMTMNFSLQAI | |
| | | | | | | DHIINSAAKTLYMSGGQMGC | |
| | | | | | | PIVFRGPNGAAARVGAQHSQ | |
| | | | | | | CFASWYAHIPGLKVVAPWSA | |
| | | | | | | ADAKGLLRAAIRDPNPVIVL | |
| | | | | | | ENEILYGQKFPCPVDEDFIL | |
| | | | | | | PIGRAKIEREGTDVTLVAFS | |
| | | | | | | IMVGVALEAAAILADEGISA | |
| | | | | | | EVINLRSIRPLDTETIVRSV | |
| | | | | | | KKTNRIVSVEEGWPVAGIGA | |
| | | | | | | EICTVAVEQAFDWLDAPPAR | |
| | | | | | | VCGLDLPMPYAANLEKLALP | |
| | | | | | | KPEWVVDAVRKQLRD | |
| GO_ | petP | HTH-type | L | | Down | MDVSSSATAHLYLREDRIRQ | 274 |
| 1846 | | transcriptional | | | | SYEAMMLAWRTLNADCEALL | |
| | | regulator PetP | | | | REKGLGPAHHRILFLTAAHP | |
| | | | | | | GITPGVLLNSLGITKQSLGR | |
| | | | | | | ALGDLRERKLLIQEEDRHDR | |
| | | | | | | RKRPLRLTASGEALERELFL | |
| | | | | | | MIREVMTRAYREAGMTAVEG | |
| | | | | | | FRRVLAPLQVPAESRAR | |
| GO_ | petR | DNA-binding | L | | Down | MSDEHILVVDDDPRLLRLLQ | 275 |
| 1847 | | response | | | | RYLSENGYRVSTALDAQTAR | |
| | | regulator | | | | DVLQRIQPDALVLDVTMPGE | |
| | | PetR | | | | DGLSLTNSLRRDGLSLPILL | |
| | | | | | | LTARGEPADRIGGLEAGADD | |
| | | | | | | YLGKPFEPRELLLRLRAHLR | |
| | | | | | | RMVPSLPAVDEVPDVLRLGE | |
| | | | | | | LEFDVKRGLLSGPQGAVHLT | |
| | | | | | | GGESALLGVLTRQPGTVLSR | |
| | | | | | | EAIARALEMDEIGERAVDVQ | |
| | | | | | | VTRLRRRIEADPKEPRFLHT | |
| | | | | | | VRGKGYVLKPGR | |
| GO_ | phoR | Phosphate | L | | Down | MVLVCVALAGWVLAVWLLLR | 276 |
| 1161 | | regulon | | | | QPRVPTSPPDDYLTPVSPAD | |
| | | sensor protein | | | | LPVDPLPACAVVLDGLGAIV | |
| | | PhoR | | | | QVNEEAASQFGETVGAILRH | |
| | | (SphS) | | | | PAARAALSAALRAPVPASPS | |
| | | (EC 2.7.13.3) | | | | GSSNRGDLPPVCSTTFTLDV | |
| | | | | | | PVPRTLHLMLRRLPGGKGQD | |
| | | | | | | RRVLVVLTDRSEAQAADRMR | |
| | | | | | | MDFVAHASHELRTPLASLSG | |
| | | | | | | FIDALQGAAGENPVMRQQFL | |
| | | | | | | DIMRQQSERLKRLIDRLLYL | |
| | | | | | | SRVQAHEHQRPRDVVDVADL | |
| | | | | | | MAVVLGEVAPRFEQEGRTLK | |
| | | | | | | LEIEDDLLVRADEDEMVQVL | |
| | | | | | | LNLIENALRYGAQEGDPLTI | |
| | | | | | | TLSARRAASPDDRWPADGGV | |
| | | | | | | ILGIEDNGCGMEAHHLPRLT | |
| | | | | | | ERFYRVGAPTDGAGQGTGLG | |
| | | | | | | LSIVRHILDRHGGRLRIASA | |
| | | | | | | PGKGTTCLVWLPPAGATLAV | |
| | | | | | | SMVE | |
| GO_ | pstA | Phosphate | L | | Down | MSETVVSTTGWKPNPRAARR | 277 |
| 1165 | | transport | | | | RRADHLATAFGMVMAGILVL | |
| | | system permease | | | | VLASILWTLLSRGLAGLSAA | |
| | | protein PstA(TC | | | | AIMKPMGPPGSSSGLANAIV | |
| | | 3.A.1.7.1) | | | | GSLIQTFMALLMATPLGLGC | |
| | | | | | | GIYLSEYGTETNKFASCVRF | |
| | | | | | | VSDVLMSVPSILVGLFVYQV | |
| | | | | | | LVAPFGHFSALAGSVALAIL | |
| | | | | | | AVPIIVRTTEDMLRLVPTSM | |
| | | | | | | REAGAALGATRWRVTLSLCL | |
| | | | | | | RSAKTGVLTGILLALARVSG | |
| | | | | | | ETAPLLFTSLGNQNWSFSLN | |
| | | | | | | RPMASLPVTIYQYAGASYED | |
| | | | | | | WVQLAWAGALLVTMGVLAIN | |
| | | | | | | IAVRVSARRG | |
| GO_ | pstB | Phosphate | L | | Down | MIQDSMMTETDPQVAKSPEV | 278 |
| 1164 | | transport | | | | ALAVRNLNFYYGENHALHDI | |
| | | ATP-binding | | | | SIDFPARRVTAMIGPSGCGK | |
| | | protein | | | | STLLRVFNRMYDLYPGQRAT | |
| | | PstB (TC | | | | GEVIFDGRNVLERDLDLNIL | |
| | | 3.A.1.7.1) | | | | RARVGMVFQKPTPFPMSIYD | |
| | | | | | | NIAFGVRLHEKLNKADMDAR | |
| | | | | | | VQDVLTRVALWNEVRDRLNA | |
| | | | | | | PASGLSGGQQQRLCIARSIA | |
| | | | | | | TRPEVLLLDEPTSALDPIST | |
| | | | | | | ARIEELLDELKEEFTIAIVT | |
| | | | | | | HNMQQAARCADQVAFFYMGR | |
| | | | | | | LIEVDSADRMFTNPKQQQTQ | |
| | | | | | | DYITGRFG | |
| GO_ | pstC | Phosphate | L | | Down | MTLATATQPEEARDKAGVSH | 279 |
| 1166 | | transport | | | | SGSRRSGPDTAFHLLVAASA | |
| | | system permease | | | | LLVLVVLGGLVVLMGVGGSQ | |
| | | protein PstC(TC | | | | AFRTFGLGFAFHDVWNPVAD | |
| | | 3.A.1.7.1) | | | | QYGAWAPLFGTIVSTLIGVA | |
| | | | | | | IALPLAFGTAFWLTAMAPPR | |
| | | | | | | IAAIVGTAVQLLAAVPSIIF | |
| | | | | | | GMWGFFTIVPFMARTVQPFL | |
| | | | | | | THHFRHVPGIRFIIHGAPFG | |
| | | | | | | TGLMTAGLVLAVMIAPFMTA | |
| | | | | | | VMRDVFAAMPAMLRESAYGL | |
| | | | | | | GATRWDVMWKVVVPWSRTGM | |
| | | | | | | IGAIVLGMGRALGETMAVTF | |
| | | | | | | VIGNVTAVGWSLFAPRSTVA | |
| | | | | | | SLIALQFPESPAGSLRLSAL | |
| | | | | | | LALGFILMLLSFASLALARM | |
| | | | | | | LRGDTK | |
| GO_ | pstS | Phosphate ABC | L | | Down | MIKSRAPLFGLLVATALGTA | 280 |
| 2369 | | transporter, | | | | AMTPFVSSAKAADITGAGSS | |
| | | periplasmicphosphate- | | | | FAAPIYGAWGTAAKSQAGIA | |
| | | binding protein PstS | | | | VNYQSVGSSAGQDQVIARTV | |
| | | (TC 3.A.1.7.1) | | | | DFGASDKPMSGDRLAKEKLY | |
| | | | | | | QFPTVMSGIVVVANVPGIAP | |
| | | | | | | GQLRLDGPTLAGLYDGEITT | |
| | | | | | | WDDDRIKALNPGLKLPDTDV | |
| | | | | | | APIHRADGSGTSYVFTSYLS | |
| | | | | | | QVSPTWKQKLGAGTSIAWPG | |
| | | | | | | GSGARGNDGIAAMVRQTEGG | |
| | | | | | | VGYVEYSYAAQNHLNIAQMK | |
| | | | | | | NHSGAFVAPTLASFAEAAKA | |
| | | | | | | ADWVHADHYAVNLLDTDGAS | |
| | | | | | | SWPIVTATFVLVPVDAAQKE | |
| | | | | | | SGKAVRNFFAWGFQHGDADN | |
| | | | | | | ARLDYVGLPQNVKTDILANW | |
| | | | | | | PK | |
| GO_ | speC | Pyridoxal 5- | L | | Down | MTPKITRFLAEQQPATPCLV | 281 |
| 201 | | phosphate (PLP)- | | | | VDLDVVGAHYRALHDALPEA | |
| | | dependent ornithine | | | | KIYYAIKANPAPAILDRLVA | |
| | | decarboxylase (EC | | | | LGSSFDVASPAEIRMCLDAG | |
| | | 4.1.1.17) | | | | AAPDRISYGNTLKKAEWIRE | |
| | | | | | | AHDLGISLFVFDSIEELEKL | |
| | | | | | | AKHAPGARVFCRLAVENEGA | |
| | | | | | | DWPLSRKFGTTLSNARALML | |
| | | | | | | RARELGLKPYGLSFHVGSQQ | |
| | | | | | | TGVAAYDHAIAKAAGLYHDL | |
| | | | | | | RAQGVDLQMLNLGGGFPTHY | |
| | | | | | | RENVPSVQDFAHTIHTSLKT | |
| | | | | | | HFPDGAPEILLEPGRYMVGQ | |
| | | | | | | SGVVSSEVILVSRRGGALTD | |
| | | | | | | PRWVYLDIGRFGGLAETEGE | |
| | | | | | | AIRYTFRTSRDSEDAARSPC | |
| | | | | | | VVAGPSCDGVDIMYEKNRIP | |
| | | | | | | LPDSLECGDRVEILATGAYV | |
| | | | | | | STYCSIGFNGFPPLTEYYI | |
| GO_ | surA | Periplasmic | L | | Down | MSKTHCIASTALAALLAFSA | 282 |
| 2743 | | chaperone and | | | | ALPATAAPHHKADPKAASKT | |
| | | peptidyl-prolylcis- | | | | AATKQEAPPAKPPEDQILAV | |
| | | trans isomerase of | | | | INGQVLTQRDVDNRAKLFVL | |
| | | outer membrane | | | | STGLPISPEIMNRMRGQIIH | |
| | | proteins SurA | | | | QLIDERLKTQEILKLHINVE | |
| | | (EC | | | | PDQIAGAISNIEQRNGMPKN | |
| | | 5.2.1.8) | | | | ALRDRLASDGVSLTTLIDQI | |
| | | | | | | RVQIGWMQVLREKLGEEGRI | |
| | | | | | | TATQISQREQALQAEQGRAQ | |
| | | | | | | YFMSEIFVPVADPRHDENEL | |
| | | | | | | AFTKTIISQLREGAPFPIVA | |
| | | | | | | AQFSQAQSALDGGSMGWVQE | |
| | | | | | | DNLDPQVVNIVRQMPIGAIS | |
| | | | | | | NPIQVAGGFVIATVQSKRVV | |
| | | | | | | GKQMGTLLDLRQAFFPFDAP | |
| | | | | | | LNPQNPTEQQRAALQKATTA | |
| | | | | | | VQTVHSCDAMEALNKSLGEK | |
| | | | | | | RPSNPGSQILERLMPQMKAV | |
| | | | | | | LEALPPNRVSRPLVSMDGIA | |
| | | | | | | LLMVCNRQQKNLAQQSPSEI | |
| | | | | | | ADQLMNERVEQASRQLQRDL | |
| | | | | | | QRRAIIEMRPAAKTAFN | |
| GO_ | tonB | TPR domain protein, | L | | Down | MSLSLYRRLSARNLLLAGVF | 283 |
| 2957 | | putative component | | | | GIAALAGSAHADDVLGQAVG | |
| | | of TonBsystem | | | | KDLQQAQSALAAKNYAKAMD | |
| | | | | | | AVDAADAVKGKTDYEAYTTA | |
| | | | | | | QMRAAIAAQSGNTDAAIKAY | |
| | | | | | | DVLINSSRTPKATKGQMLMA | |
| | | | | | | QATMAYSAKQYARAIPATER | |
| | | | | | | YLKEYGADPRMQTMLIQCYY | |
| | | | | | | LQQDWKGTAKAAQEQVDATI | |
| | | | | | | KAGKVPAENQLQMLATAYTN | |
| | | | | | | LKDADAKTHAYVLLAKYYSK | |
| | | | | | | PDYWSMLIHDLVANPNLSPP | |
| | | | | | | LVFYVERLRLATGVLKDPSD | |
| | | | | | | YQDMGERAVOMGLPQLALNL | |
| | | | | | | LNQGYANHSLGNGPTAAADA | |
| | | | | | | KFHAFVAQQAATNRSQLASA | |
| | | | | | | VTQAASAPNAGPALTAGYNQ | |
| | | | | | | VLNGQVDAGLALMKTGLGKN | |
| | | | | | | PRYPDLAQVEYGMAQMDGGQ | |
| | | | | | | KAEAIKTFASVQGNGPAKDV | |
| | | | | | | AELWSLLLSRPTK | |
| GO_ | top1 | DNA topoisomerase | L | | Down | MTDVVVVESPAKAKTINKYL | 284 |
| 2929 | | I (EC 5.99.1.2) | | | | GSGYTVLASFGHVRDLPPKD | |
| | | | | | | GSVRPDENFAMSWQTDERGA | |
| | | | | | | KQISAITKALKGAKNLYLAT | |
| | | | | | | DPDREGEAISWHVRSVLEEK | |
| | | | | | | KLLKNVDVHRVTFNEITKSA | |
| | | | | | | VTAAMAAPRELDRPLIDAYL | |
| | | | | | | ARRALDYLVGFTLSPVLWRK | |
| | | | | | | LPGSRSAGRVQSVALRLICE | |
| | | | | | | REAEIEVFRPKEYWTVTGGF | |
| | | | | | | TTPGKAAFQARLTHLKGEKL | |
| | | | | | | DQFDLNNEQLAFGARDTVLG | |
| | | | | | | GQFTVRSVERKRTKRNPPPP | |
| | | | | | | FTTSTLQQEASRKLGMSAQT | |
| | | | | | | TMRTAQQLYEGVDLRGETTG | |
| | | | | | | LITYMRTDGVTMAKEAVGAI | |
| | | | | | | RGHIGKAFGDEYVPDYPRSY | |
| | | | | | | STKAKNAQEAHEAIRPTDVF | |
| | | | | | | LTPQQVAHALTPEQKKLYEL | |
| | | | | | | IWKRSVASQMQSAELDQVAV | |
| | | | | | | TLADASGQTLLRATGSTIAF | |
| | | | | | | DGFLKLYIEGRDDTKAEDED | |
| | | | | | | GKLLPPMKEGDRLTTGTVDA | |
| | | | | | | EQHFTQPPPRYSEASLVKKM | |
| | | | | | | EEIGIGRPSTYASILGVLRD | |
| | | | | | | RNYVRLDARRFVPEDRGRLV | |
| | | | | | | TAFLTSFFERYVDTGFTASL | |
| | | | | | | EEQLDDISGGRADWHDVMAA | |
| | | | | | | FWHDFSAAVAQTKDLKISDV | |
| | | | | | | IDALDEDLGPHFFPPRPDGA | |
| | | | | | | DPRVCTSCGTGRLGLRLGKF | |
| | | | | | | GAFIGCSNYPTCQFTRRLVA | |
| | | | | | | EEGDSEGLNDGPKVLGQDPE | |
| | | | | | | TGEDISIRRGPYGLYIQRGE | |
| | | | | | | PNPEDKKAKPKRTTIPKGID | |
| | | | | | | GNTMTMEQALGLLSLPRLIG | |
| | | | | | | LHPETGEKIEAGLGRFGPYV | |
| | | | | | | KMGAIYGTLDKDDDVLTVGL | |
| | | | | | | NRAVDALAKKLASIRNLGPH | |
| | | | | | | PKDGEPVMIRKGRFGPYAQH | |
| | | | | | | GQLITNLPKGQDMDEVTLDE | |
| | | | | | | AVALLAEKGKPLKGGAKKTS | |
| | | | | | | AKKAAPKAAKAKKAVAAAEG | |
| | | | | | | DEAAPKKVTKRSPAKSATKT | |
| | | | | | | KTTTPRKRKTVSDTSSEG | |
| GO_ | ykoH | Two-component | L | | Down | MSRADLRFSELFRADLFRTA | 285 |
| 2648 | | system sensor | | | | TFRLTLAFVVAIIAGMALQF | |
| | | histidine kinase | | | | GLVYGQMSGYEQQRSTDLLQ | |
| | | | | | | REAALLVHETPAELEYEVRE | |
| | | | | | | RSKTDLRVILNGAALFDMSR | |
| | | | | | | NRIAGDIKKWPVGLEVSPKT | |
| | | | | | | QRLWDAPPGDTPYEMRYLAV | |
| | | | | | | EVEGTNGNRDRILVLARSLH | |
| | | | | | | MANELRYITKRAALMSVVPV | |
| | | | | | | VAFALMAGIFLSHRALGRIK | |
| | | | | | | DMHEAIDRIMDGDLHERLPT | |
| | | | | | | GRERDDIERLAVSVNRMLDR | |
| | | | | | | LEHLLDEIRDVGNDIAHDLR | |
| | | | | | | TPLARVKARLERVSAITNDP | |
| | | | | | | AALQGAIERAALDLEQCFSV | |
| | | | | | | ITALLRIGEIENGRRRAGFA | |
| | | | | | | MLDLRELLAGVVDLYEPIAE | |
| | | | | | | TEGVMLEVVDSDKPVPLFGD | |
| | | | | | | KDLLNEVLANLVDNAIKFTP | |
| | | | | | | EPGTVRLSAGQGPDGATWLQ | |
| | | | | | | VADTGIGIAEDERKAVMGRF | |
| | | | | | | YRSDKSRHVPGSGLGLSLVS | |
| | | | | | | AILRLHGASVDIVSAHPGQA | |
| | | | | | | LPGAVFTIHFAPPASV | |
| GO_ | GO_ | Amidohydrolase | | F | Down | MTIRSSFAALLLATPAALSV | 286 |
| 2942 | 2942 | precursor | | | | GSAMAEPVAFEHARLIDGTG | |
| | | | | | | ALAQPDATVVIDNGTIISVG | |
| | | | | | | IPAPAQVRHVDLTGKTLMPA | |
| | | | | | | LISDHVHVGLVKGTGASRDN | |
| | | | | | | YTRANILAALKQYSDYGVLT | |
| | | | | | | VTALGLNRSPLFDTLRQEQH | |
| | | | | | | DGRNPGADLYGVDQGIGAPD | |
| | | | | | | GVPPAAMVKGVGPDQVFRPT | |
| | | | | | | TPEEARKDVDQMIAEHTDLV | |
| | | | | | | KLWVDDFRNDVPDGKTYPML | |
| | | | | | | PPAIYQAVIDEAHQHGTRVA | |
| | | | | | | VHIHDLAVAKAIVASKADIL | |
| | | | | | | AHGVRDQPVDHDLIAAMLRQ | |
| | | | | | | GTWYIATLDLDEANYLYAEQ | |
| | | | | | | PELLSNPFVLAGVNPALRRQ | |
| | | | | | | FTDPKWRAETLAKPLTKASH | |
| | | | | | | YALSVNQKNLAVLYRAGVKV | |
| | | | | | | GFGTDSGAAPTRIPGFAEHR | |
| | | | | | | ELYLTVQAGLSPVQAISLAT | |
| | | | | | | GNAAALLHLSDRGVIAPGRR | |
| | | | | | | ADLLVVNGNADENIGAVDQI | |
| | | | | | | DQVWQRGMLVSHGPVRSKN | |
| GO_ | GO_ | Uncharacterized | | F | Down | MTLSVIHDKTTTLTGAPVAA | 287 |
| 313 | 0313 | SAM-dependentO- | | | | LLERLFAEAETATNPAIADI | |
| | | methyltransferase | | | | PREEFQRLAGSRTEYRKFYG | |
| | | | | | | LAKHLWLPVSRETGTLLYML | |
| | | | | | | ARATWAKNIVEFGTSFGIST | |
| | | | | | | IHLAAALRDNGGGKVITTEF | |
| | | | | | | EPSKVARARAHLEEAGLADL | |
| | | | | | | VEFREGDALQTLAAGLPESI | |
| | | | | | | DIVLLDGAKPLYPDILDLLE | |
| | | | | | | DRLQAGALIVADNADHSPEY | |
| | | | | | | LARVRSPAAGYLSLPFAEDV | |
| | | | | | | ELSVRLH | |
| GO_ | GO_ | Glutamate N- | | F | Down | MAKPLPVSPLARPLPDLATI | 288 |
| 1376 | 1376 | acetyltransferase | | | | AGVRLSAVAAGIRYQGRTDL | |
| | | (EC | | | | MLAEFVPGTVAAGVYTKNAC | |
| | | 2.3.1.35) | | | | PGAPVLWCREALTTPYARAL | |
| | | N- | | | | LVNAGNANVFTGRAGMQACE | |
| | | acetylglutamate | | | | DCADATAQLLDCPPQDVFLA | |
| | | synthase (EC | | | | STGVIGEKLPQDRIIAALPA | |
| | | 2.3.1.1) | | | | ARAGLEENGWADAARAIMTT | |
| | | | | | | DTFPKAARRDVKINGTPVRI | |
| | | | | | | QGIAKGSGMVAPDMATMLAY | |
| | | | | | | VATDARLPQNVLQSLLASGC | |
| | | | | | | AQSFNSITVDSDTSTSDMLM | |
| | | | | | | IFATGLADNPEVDDVNDPAL | |
| | | | | | | AEFTLALNDLLLELALMVVR | |
| | | | | | | DGEGATKLVRIAVTGADSNL | |
| | | | | | | SAHRIALCIANSPLVKTAIA | |
| | | | | | | GEDANWGRVVMAVGKSGEPA | |
| | | | | | | DRDRLSVAIGGTWIAKDGGV | |
| | | | | | | VENYDEAPVVAHMKGQEIEI | |
| | | | | | | AVDLGLGDGQARVWTCDLTH | |
| | | | | | | GYIDINGSYRS | |
| GO_ | GO_ | hypothetical | | F | Down | MIDFSSWHSLLATLIGLALF | 289 |
| 178 | 178 | protein | | | | TLIGVGIRLLTMLTIQQRRE | |
| | | | | | | RMNRQINERLRVLMAAYRTL | |
| | | | | | | GGSFTGTLLVDPTHKRDLEP | |
| | | | | | | DQLSGSDRNRRIRDAVEAAL | |
| | | | | | | SDIILLGTEEQVRMAGRAAA | |
| | | | | | | ELVAGRPVPTHDLVVSLRNF | |
| | | | | | | IRKALNLESLPSDLVLPEQG | |
| | | | | | | PARPSSSGGNKGDGKEGGKG | |
| | | | | | | GGGGGDGGGGGGMGMQGGMD | |
| | | | | | | PALHHSETDSHTL | |
| GO_ | GO_ | Phage shock | | F | Down | MSPDNLALLIPIVAIIAWSV | 290 |
| 2357 | 2357 | protein | | | | TSMVKHTTRQADPPGQPDPM | |
| | | B | | | | LQAALTQAEAHATRLEERID | |
| | | | | | | OLERILDEDIPGWRARNAR | |
| GO_ | GO_ | Threonine | | F | Down | MRYRSTRGELTADAPNFSDI | 291 |
| 2556 | 2556 | synthase | | | | LLAGLAGDGGLYMPESWPRI | |
| | | (EC 4.2.3.1) | | | | SPQTLREWRTLSYPDLAAEV | |
| | | | | | | IALFTEGAIDVDTLRDMTRD | |
| | | | | | | AYADFDHAAVVPLVEVEQDL | |
| | | | | | | YSLELFHGPTLAFKDMAMQM | |
| | | | | | | LGRLFDHVLTQRNRHVTIVG | |
| | | | | | | ATSGDTGSAAIEACRGRERL | |
| | | | | | | SVVILHPKGRTSDVQRRQMT | |
| | | | | | | TVQDDNILNIAVEGDFDTCQ | |
| | | | | | | DLVKAMFADHAFRDEVSLSA | |
| | | | | | | VNSINWARIAAQIPYYVRAA | |
| | | | | | | LALGAPDREVSFSVPTGNFG | |
| | | | | | | NVLAAWAAKQMGLPIKKLCI | |
| | | | | | | GSNRNDILTRFVIDNDMSVR | |
| | | | | | | TVEPSLSPSMDIQVSSNFER | |
| | | | | | | LLFELLDRNSTRCAAIMREF | |
| | | | | | | RETGRMAVPHDAWTRMKEVF | |
| | | | | | | EGMTLTDEQTSEAMRLFYNE | |
| | | | | | | SLYLADPHSAIGLAVGKRFQ | |
| | | | | | | EPGIPMVAAATAHPAKFPDA | |
| | | | | | | VIAATGIHPKLPPHLSDLFE | |
| | | | | | | RTERYECMDSQIAGLQDAVR | |
| | | | | | | AHIRRG | |
| GO_ | GO_ | hypothetical | | F | Down | MIASQGPSMRRNRLSVARLS | 292 |
| 2916 | 2916 | protein | | | | VQMGAMASVGLLLSGCSGAD | |
| | | | | | | VSRAIGLERAMPDEYTVTTR | |
| | | | | | | APLSMPPSEQMQLPGAADAH | |
| | | | | | | RPDESPRMQALETLSPDTAL | |
| | | | | | | HPDAGQGSSGQTALVGQVDK | |
| | | | | | | SASAPNNAELGAADAGFVDN | |
| | | | | | | LMFWKGGNAGSVVDGDAENR | |
| | | | | | | RIRENSALGRNPATGATPTV | |
| | | | | | | RKKKAFLGVL | |
| GO_ | GO_ | ATP synthase | | F | Down | MPLRIEIVSPEKRLVEREVD | 293 |
| 2979 | 2979 | epsilon chain | | | | MAVVPGMEGDIAAMPDRAPL | |
| | | (EC | | | | MLQLRGGVVALYQGDKIVDR | |
| | | 3.6.3.14) | | | | YFVTGGFADMGADHCTILAD | |
| | | | | | | SAQLMSELSVDEAKSRLRDL | |
| | | | | | | ESRWAEIGPNDVDMHDQISR | |
| | | | | | | ELQSVRAELEAVQEHGPA | |
| GO_ | idnk | Gluconokinase | | F | Down | MTENETQLGLKPHFLVVMGV | 294 |
| 1341 | | (EC | | | | SGTGKTTVASGLATRLGWHF | |
| | | 2.7.1.12) | | | | QEGDALHPPANVEKMSTGQP | |
| | | | | | | LTDADRAPWLALCHEWLRKQ | |
| | | | | | | VEAGHGAVLTCSALKRSYRE | |
| | | | | | | QLRGEDLPIEFVHIDTSVGE | |
| | | | | | | LADRLQRREGHFMPASLLPS | |
| | | | | | | QLATLEVPGDDEPVIRVSGE | |
| | | | | | | KHPDVVLEELIRHFQAED | |
| GO_ | mobA | Molybdenum | | F | Down | MTPLYGLILAGGASKRMGTD | 295 |
| 196 | | cofactor | | | | KAALDYHGKPQLQVAFEVLS | |
| | | guanylyl | | | | PLVEKCFVSVRPDQTADPLR | |
| | | transferase | | | | SSFPQIVDTVDVDGPAAGLL | |
| | | (EC 2.7.7.77)/ | | | | SAHRAYPDVAWLVLACDLPM | |
| | | Molybdopterin | | | | LDRGTLDTLIAARDAGHVAV | |
| | | synthase sulfur | | | | SYRSEHDGLPEPLCAIWEPE | |
| | | carrier subunit | | | | ALDRLEKQVAGGRICPRKLL | |
| | | | | | | INSPTKLLEPHRRGALDNIN | |
| | | | | | | TPEERDDAARRLKDLPGGPM | |
| | | | | | | IRLTLEYFAQLRELAGTREQ | |
| | | | | | | SLETAFVTVGPLYEELREKY | |
| | | | | | | AFPFEASKLRVAINGDFAPW | |
| | | | | | | TQALKDGDHIVFIPPVTGG | |
| GO_ | nifS | Cysteine | | F | Down | MTALKTVSGTTYLDANATEP | 296 |
| 84 | | desulfurase | | | | LRPCAKEAAVEGMMLSGNPS | |
| | | (EC 2.8.1.7) | | | | SVHAEGREARRFLEDARSRV | |
| | | | | | | AAGFGRISGTCVFTSGATEA | |
| | | | | | | DAMAVHAFGQERRIFVGSTE | |
| | | | | | | HDAILRAAPEAEILPVNRDG | |
| | | | | | | ILDVEHLRSRLQDTGPALVC | |
| | | | | | | VMSANNETGVLSPLEDVLAV | |
| | | | | | | CRDSGAHLHVDAVQSAGRLP | |
| | | | | | | FALGGCSVAVSGHKMGGPKG | |
| | | | | | | AGALLLAEDEPMDALVAGGG | |
| | | | | | | QERGRRGGTQALPAILGMAA | |
| | | | | | | AFDAARAQDWAPVQRLRDRV | |
| | | | | | | EAAAKSVGARVAGEAVDRLP | |
| | | | | | | NTSCLILDGVAAQVQLMALD | |
| | | | | | | LAGFCVSAGSACSSGKVSSS | |
| | | | | | | HVLRAMGETEGASQAIRVSL | |
| | | | | | | PWNVREAQVEAFCEAYEAMA | |
| | | | | | | RRLRK | |
| GO_ | phgdH | D-3- | | F | Down | MSSKPDILTIDPLVPVMKER | 297 |
| 2626 | | phosphoglycerate | | | | LEKSFTLHPYTSLENLKSIA | |
| | | dehydrogenase | | | | PAIRGITTGGGSGVPSEIMN | |
| | | (EC | | | | ALPNLEVISVNGVGTDRINL | |
| | | 1.1.1.95) | | | | DEARRRNIGVATTQNTLTDD | |
| | | | | | | VADMAVALMMTVMRGIVTND | |
| | | | | | | AFVRAGKWPSATPPLGRSLT | |
| | | | | | | RKKVGIAGFGHIGQAIAKRV | |
| | | | | | | SAFGMEVAYFNSHARPESTC | |
| | | | | | | HFEPDLKALATWCDVLILAV | |
| | | | | | | SGGPRSANMIDRDILNALGK | |
| | | | | | | DGFLVNIARGTVVDEAALLS | |
| | | | | | | ALQEKRIAGAGLDVFQNEPN | |
| | | | | | | INPVFLSLPNTVLQAHQASA | |
| | | | | | | TVETRTAMAHLVVDNLIAYF | |
| | | | | | | TDKTLLTPVI | |
| GO_ | lychF | GTP-binding and | | F | Down | MGFNCGIVGLPNVGKSTLFN | 298 |
| 2153 | | nucleic | | | | ALTETAAAQAANYPFCTIEP | |
| | | acid-binding | | | | NTGRVAVPDPRLDELARIGK | |
| | | proteinYchF | | | | SIRKVPTSLEFVDIAGLVRG | |
| | | | | | | ASKGEGLGNQFLANIREVDA | |
| | | | | | | IVHVLRCFEDDDITHVEGGV | |
| | | | | | | DPVRDADIIETELMLADLES | |
| | | | | | | LEKRQVGLQKRARGNDREAQ | |
| | | | | | | AQLELMEPLLAALRDGKPAR | |
| | | | | | | TAVSKGQEAEASRLQLLTTK | |
| | | | | | | PVLYVCNVEEASAATGNAFS | |
| | | | | | | EAVRKRAEAEGAGVVVVSAA | |
| | | | | | | IEAEVSQLPQEDRTEFLEGL | |
| | | | | | | GLTDSGLDRVIAAGYKLLGL | |
| | | | | | | RTYFTVGPKESRAWTITAGT | |
| | | | | | | KAPQAAAVIHNDFERGFIAC | |
| | | | | | | ETVAFDDYVACNGEAGAKES | |
| | | | | | | GKLRIEGKEYVVQDGDVLLF | |
| | | | | | | RFNV | |
| GO_ | GO_ | Transcriptional | | F | Down | MSDDPPFLRDADQTRKNILE | 299 |
| 29 | 29 | regulator, | | | | VALKEFAEYGLAGARVDRIA | |
| | | AcrR | | | | RGTRTTKGMIYYHFGDKDGL | |
| | | family | | | | YKAVLEKVYPSLRSDEEHLD | |
| | | | | | | VRNTDPVEALERIIDFTLDY | |
| | | | | | | HEKHEDFVRIVMIENINKGE | |
| | | | | | | HLRKTGIDSTVSYRIMMVIA | |
| | | | | | | DILNRGMALGLFKREITPVD | |
| | | | | | | LHIFYTSFCFYRVGNHHTVS | |
| | | | | | | SVLGINMLSAQSCARHRRMV | |
| | | | | | | KDAVIAYLASSD | |
| GO_ | GO_ | Pyruvate | | F | Down | MTYTVGHYLAERLTQIGLKH | 300 |
| 2220 | 2220 | decarboxylase | | | | HFAVAGDYNLVLLDQLIEQG | |
| | | (EC | | | | GTKQIYDCNELNCSFAAEGY | |
| | | 4.1.1.1) | | | | ARANGAAAAVITFSVGAISA | |
| | | | | | | MNGLGGAYAENLPILVISGA | |
| | | | | | | PNSNDHGSGHILHHTIGTTE | |
| | | | | | | YSYQMEMAKHVTCAAESITS | |
| | | | | | | AEAAPAKIDHVIRTMLREKK | |
| | | | | | | PAYLEIACNISAAPCVRPGP | |
| | | | | | | VSSLHAHPRPDEASLKAALD | |
| | | | | | | ESLSFLNKANKVAILVGTKL | |
| | | | | | | RAAEALKETVELADKLGCPV | |
| | | | | | | TVMAAAKSYFPETHPGFRGV | |
| | | | | | | YWGDVSSPGAQEIIEGADAV | |
| | | | | | | ICLAPVWNDYSSGGWKSIVR | |
| | | | | | | GEKVLEVDPSRVTVNGKTFD | |
| | | | | | | GFRLKEFVKALTEKAPKKSA | |
| | | | | | | ALTGEYKPVMLPKADPSKPL | |
| | | | | | | SNDEMTRQINELVDGNTTLF | |
| | | | | | | AETGDSWFNAVRMHLPEGAK | |
| | | | | | | VETEMQWGHIGWSVPSMFGN | |
| | | | | | | ATASPERKHVLMVGDGSFQL | |
| | | | | | | TAQEVAQMVRYELPVIIFLV | |
| | | | | | | NNHGYVIEIAIHDGPYNYIQ | |
| | | | | | | NWDYAALMQCFNQGVPGEES | |
| | | | | | | GKYGLGLHATTGAELAEAIA | |
| | | | | | | KAKKNTRGPTLIECKLDRTD | |
| | | | | | | CTKTLVEWGKAVAAANSRKP | |
| | | | | | | QSV | |
| GO_ | asns | Asparagine | | S | Up | MCGIAGLSCLPGHHPDQDAL | 301 |
| 2458 | | synthetase | | | | ERMSQAIFHRGPDGEGRLDL | |
| | | [glutamine- | | | | GGAALRHRRLSIVDIAGGAQ | |
| | | hydrolyzing] (EC | | | | PFRLGAAALIANGEIYNDPA | |
| | | 6.3.5.4) | | | | IRRRFPKTCFQTYSDCEPPL | |
| | | | | | | HLWLHDGAGYTHELRGMYAI | |
| | | | | | | AIVENEHGRHEMVLSRDPFG | |
| | | | | | | IKPLYIAAYEGGIAFASEPQ | |
| | | | | | | ALLAGGFGKRSIRDSARDEL | |
| | | | | | | MQLQFTTGQDIIFDGIRRLL | |
| | | | | | | PGETLRIVDGRIVESRRRHV | |
| | | | | | | LHEARDTVPARLSDEQALER | |
| | | | | | | LDTALLDSVSAHLRADVPLG | |
| | | | | | | LFLSGGIDSSVILAAAHRLG | |
| | | | | | | LPHPRTWTARFDAGKADESA | |
| | | | | | | DAAALAASVGAEHHVLTVTE | |
| | | | | | | DMVWRELPSIVACMDDPAAD | |
| | | | | | | YATIPTWFLAREARKDVTVI | |
| | | | | | | LSGEGGDELFAGYGRYRRVM | |
| | | | | | | KPWWKGGRAPYRSGTFGRRF | |
| | | | | | | AEHGRQWRRGIAMTELALGV | |
| | | | | | | SGLEGAQALDIAEWLPNDLL | |
| | | | | | | LKLDRCLMAHSVEGRTPLLD | |
| | | | | | | PVVAKAIWPLPEHFKVRDGY | |
| | | | | | | GKWLLRRWLQDALPQARPFA | |
| | | | | | | PKQGFTVPVGPWIEKQAHRL | |
| | | | | | | GPLVARQPCIRAMMPAVDVE | |
| | | | | | | RLFARASQRGVARQAWTLLF | |
| | | | | | | FALWHRHHIEGVPVEGDTFE | |
| | | | | | | TLARAS | |
| GO_ | czcD | None (Cobalt- | | S | Up | MTPDPHHDCACDHAHHGTTV | 302 |
| 1427 | | zinc-cadmium | | | | PHEHHAHDHADHDHDDHHHD | |
| | | resistance | | | | HDHCDGHSHGFGFGHQHVHA | |
| | | protein | | | | PASFGMAFAVGITLNTAYVA | |
| | | CzcD) | | | | GEALWGVWAHSLSLLADAGH | |
| | | | | | | NLSDVLGLAGAWLAQVLATR | |
| | | | | | | PSSARFTYGLRRSTILSALA | |
| | | | | | | NAMILLLVTGGIVWESVLRL | |
| | | | | | | FSHQNVQGEVISWVALVGIA | |
| | | | | | | VNAVTALLFMKGASSDLNVR | |
| | | | | | | GAFLHMAADAVMAFSVVIAG | |
| | | | | | | LLIAFTGYTIIDPIMSLIVS | |
| | | | | | | VSIVIGTWSLLRSSLDLALD | |
| | | | | | | AVPAGIDPDAVQAALLSLDG | |
| | | | | | | VSGLHHLHIWAMSTTETALT | |
| | | | | | | VHLVCDPTKPVSTDLVIARA | |
| | | | | | | AELVRTRFDIAHPTFQLETQ | |
| | | | | | | PSVCDTHQPCC | |
| GO_ | GO_ | hypothetical | | S | Up | MLASGIFQFLPAGVVTEKGV | 303 |
| 1177 | 1177 | protein | | | | FSIHEKMNWRSCLWCRPLVR | |
| | | | | | | LGATTA | |
| GO_ | GO_ | Putative | | S | Up | MSHPVSRRDFAVGLVAGVAA | 304 |
| 1928 | 1928 | hemagglutinin- | | | | AGTGVAGAADPEKAVPTPPP | |
| | | related | | | | PPKPVAKTICFVGGYTKHGP | |
| | | protein | | | | PGGGTGNGQGISVFDMDRDT | |
| | | | | | | GVLTPITTFTDIASPSFLAI | |
| | | | | | | SKDQRFLYALSEIDDFNKDG | |
| | | | | | | DGSVTAFAIDPKTGSLRKLN | |
| | | | | | | VVSSKGAVPAHLSIHHSGRY | |
| | | | | | | VLVANYVGGCVAVLPIRSDG | |
| | | | | | | SLGEASDVVHNTGPRQPERA | |
| | | | | | | SDNPQGNFAVSDHSGSHPHM | |
| | | | | | | IHSDPSGKFVLADDAGLDRV | |
| | | | | | | YVWTLNIDTGKLIPAKTPYY | |
| | | | | | | DMEPGSAPRHFQFNHSGRIL | |
| | | | | | | YNLCEQDSKVVVSNFDPATG | |
| | | | | | | AINDIQTVSTVTSHFRGSTL | |
| | | | | | | AAEILISASGKFVYVSNRLG | |
| | | | | | | DSLAVFAIGADGTLTLQDEV | |
| | | | | | | WMHADYGRALMFDPSGAFLF | |
| | | | | | | CANQRSDAVTSFKVDKKTGE | |
| | | | | | | IAFTNNFTPVGSPTTFAFMN | |
| | | | | | | TQV | |
| GO_ | GO_ | hypothetical | | S | Up | MGSYCGIHFDKLSICGSKSE | 305 |
| 783 | 783 | protein | | | | VPGDWAALFQERDRRETRPT | |
| | | | | | | QEVGADPDLCVEYAASRDVI | |
| | | | | | | LRRLSILGATDEAVQRAFET | |
| | | | | | | WLTEEQEQWRDNTEGWSDQE | |
| | | | | | | VISEHAAKMLKGLNGLTYQE | |
| | | | | | | WCRFASGALRIRYDFANYDR | |
| | | | | | | IQSDLASDPFRNQFHEPDDG | |
| | | | | | | YLWFAGYGSHLGLRALLDAV | |
| | | | | | | PDIKEVRLDISDLLGEYVDE | |
| | | | | | | HEPICSRARENAPCQLQMLA | |
| | | | | | | PTMVMAEGSSDLTALRLGLG | |
| | | | | | | AMHPDLMDYFSFFNHAELSV | |
| | | | | | | DGGAHYLVKFLKAIAAARST | |
| | | | | | | SRILAIFDNDTVGIQAYEQA | |
| | | | | | | RALKLPFNIIVTRYPDSDVA | |
| | | | | | | KAYPTVGRSGPAILDVNGQA | |
| | | | | | | AGIELYMGREALLSNGELRP | |
| | | | | | | VRWASYVASAGKYQGEVDGK | |
| | | | | | | RQVLEAFRKNIATVEGPEAA | |
| | | | | | | RASFPDLERVWQHNFDLVQE | |
| | | | | | | NSGLVYLRTGKRLA | |
| GO_ | hlyD | HlyD family | | S | Up | MSSSDMIPNEGQPSGQSDED | 306 |
| 1175 | | secretion | | | | FNQHVPRTATDPFAPNDMPL | |
| | | protein | | | | ALLEFHSPTAGLINLPATPA | |
| | | | | | | ARYIILLIGGLFLACLAVMA | |
| | | | | | | LFPINRVVSTPGRLISTQPT | |
| | | | | | | IVVQPLETSIIRSIDVHVGD | |
| | | | | | | FVKKGDVLAHLDPTITEADI | |
| | | | | | | TNMHLQRDAYQAEYDRLKAE | |
| | | | | | | AAGQDYHVNLNDPASVEQGA | |
| | | | | | | AFLRRKTEYQAHVENYAQQI | |
| | | | | | | ASLESDIQGYRANAAMYGSK | |
| | | | | | | MRVASEVLQMRQREQADQVG | |
| | | | | | | SRLSTLGAQTELMEAERAEI | |
| | | | | | | AAQQSANSAEKKLAAMKAER | |
| | | | | | | DGYIGNWQAKIYSDLTEAGH | |
| | | | | | | HLAEYRSSYEKARLRQDLVL | |
| | | | | | | LRAPEDGIVLTIAQGSVGSV | |
| | | | | | | LQSAGQFITLVPTGYGLEME | |
| | | | | | | AVLRSQDVGFVQVGDHALLK | |
| | | | | | | FATFPYDQYGGAEATVRVIS | |
| | | | | | | ADAFTPSSQNAGGGSNGNTP | |
| | | | | | | SDDATASGVYRVRLRIDRYT | |
| | | | | | | LHGQPSFFHPMPGMSLTADI | |
| | | | | | | DVGKRTVLQYLFNKITPALT | |
| | | | | | | NGMREP | |
| GO_ | pal | Tol-Pal system | | S | Up | MKFKVFGALGLALVLAACSN | 307 |
| 1363 | | peptidoglycan- | | | | GNTNKGDSTGAGAVAQEAGP | |
| | | associated | | | | TPGSEADLVANVGDRVFYEL | |
| | | lipoprotein | | | | NQSQLSEEARATLDKQVAWL | |
| | | PAL | | | | AKYPQVSIQVAGNCDDRGTE | |
| | | | | | | EYNIALGORRANAARDYLVA | |
| | | | | | | KGVSASRITTISYGKDRPTA | |
| | | | | | | DGDDEQSWAQNRNAITSVR | |
| GO_ | PhoB | Phosphate regulon | | | Up | MKGPSLARAKGLVLLVEDDP | 308 |
| 1162 | | transcriptional | | | | ALLLMTCYNLEQRGYRVETA | |
| | | regulatory | | | | EDGEAALLALETARPDAVVL | |
| | | protein | | | | DWMLPGLSGLDVCRRIRANP | |
| | | PhoB (SphR) | | | | ALRDVPVLLLTARSAEQDAI | |
| | | | | | | RGLDTGADDYLMKPCSIDTL | |
| | | | | | | DARLRALLRRHQSSYDRLSF | |
| | | | | | | ADITLDPETHRVERAGRMLS | |
| | | | | | | LGPTEYRLLDLLIRNPRKVF | |
| | | | | | | SREDLLRRIWGQNIHVEIRT | |
| | | | | | | IDVHIRRLRKAINGPGEVDL | |
| | | | | | | VRTVRAAGYALDDGPTTDGA | |

[0035] In embodiments, the modified bacteria have at least one engineered genetic change that is correlated with improved bioleaching of REEs, relative to REE bioleaching by unmodified bacteria of the same species as the modified bacteria. The disclosure includes the proviso that the set of modified genes may exclude a disruption of membrane bound glucose dehydrogenase (mgdh) gene as the only modification of the described bacteria. However, this gene may also be disrupted, provided it is in the context of at least one other gene modification that is described herein. In non-limiting examples, at least one genetic change increases acidification of a medium in which the modified bacteria are present. In a non-limiting example, the at least one genetic change is in a gene that is part of a phosphate transport system. In embodiments, the bacteria are modified such that they comprise a mutated gene that comprises or consists of at least one of: GO_1415, pstA, pstB, pstC, pstS, ggtl, surA, petP, ykoH, speC, and tonB. In embodiments, the modification comprises a disruption of at least GO_1415, or pstC, or a combination thereof.

[0036] The disclosure includes compositions comprising one or more REEs and modified bacteria of the disclosure. The disclosure includes a biolixiviant produced by the modified bacteria and one or more REEs. In embodiments, the disclosure relates to separating combinations of REEs. In embodiments, the disclosure relates to separating any one or combination of lanthanum, cerium, praseodymium, neodymium, promethium, samarium, europium, gadolinium, terbium, dysprosium, holmium, erbium, thulium, ytterbium, lutetium, scandium, and yttrium, from a composition comprising one or more of the REEs. The composition comprising the REEs may be any composition of matter, including but not limited to solids, semi-solids, and liquids. In embodiments, the REEs are present in a feedstock. In non-limiting embodiments, the REEs are present in coal fly ash, virgin ore, electronic waste, fluid cracking catalysts, and the like.

[0037] The disclosure includes a method comprising contacting a composition comprising one or more types of REEs with a biolixiviant produced by modified bacteria of this disclosure. In an embodiment, the method further comprising separating and optionally purifying one or more types of REEs from the composition comprising the REEs and the biolixiviant.

[0038] The disclosure comprises isolated modified bacteria, cell cultures comprising the modified bacteria, and kits comprising the modified bacteria. In an embodiment, a kit comprises one or more sealed containers comprising the modified bacteria, which can be used in REE bioleaching approaches.

[0039] The disclosure includes media in which the bacteria are cultured, and bacterial secretions. In an embodiment, the disclosure provides a biolixiviant produced by the described bacteria. In embodiments, the kit contains a sealable or sealed container that contains a biolixiviant produced by the described bacteria. The disclosure also includes modifying bacteria so that they comprise at least one of the described gene modifications.

[0040] The disclosure includes all modified microorganisms described herein. The described approaches may be used to engineer any type of bacteria. In embodiments, the bacteria are Gram-negative bacteria. In embodiments, the bacteria are obligate aerobes. In embodiments, the bacteria modified as described herein comprise any member of the bacteria family Acetobacteraceae. In an embodiment, the bacteria is a type of Gluconobacter. In an embodiment, the modified bacteria are Gluconobacter oxydans. In this regard, G. oxydans secretes a biolixiviant rich in gluconic acid. This is produced by periplasmic glucose oxidation by the pyrroloquinoline quinone (PQQ)-dependent membrane-bound glucose dehydrogenase (mGDH). The final pH of the biolixiviant is a major factor in REE bioleaching. But, gluconic acid alone fails to explain bioleaching by G. oxydans: pure gluconic acid is far less effective at bioleaching than the biolixiviant produced by G. oxydans. This means that even the most previous successful efforts to up-regulate mGDH activity and gluconic acid production are unlikely to take full advantage of G. oxydans' biolixiviant production capabilities. Thus, the present disclosure reveals a curated set of genes that can be modified to improve REE extraction, as demonstrated in the following Examples.

### EXAMPLES

[0041] To characterize the genome of G. oxydans and identify a comprehensive set of genes underlying its bioleaching capabilities, we built a carefully curated whole-genome knockout collection of single-gene transposon disruption mutants using Knockout Sudoku (FIG. 1). Final pH of the biolixiviant is a good predictor for bioleaching efficiency, thus we used acidification as a proxy for bioleaching potential and have thoroughly screened the collection to identify mutants that differ in their ability to produce acidic biolixiviant (FIGS. 2 and 3). In one non-limiting example, we demonstrate that a single gene disruption—only one of several potential enhancement strategies—can significantly improve G. oxydans bioleaching capabilities (FIG. 4). In one limiting example, we demonstrate that increasing expression of mgdh or cleanly deleting pstb or psts can significantly improve G. oxydans bioleaching capabilities (FIG. 5).

Development of a Knockout Collection for G. oxydans Covering 2,733 Genes

[0042] We built a saturating coverage transposon insertion mutant collection for G. oxydans B58 and catalogued and condensed it with the Knockout Sudoku combinatorial pooling method (FIG. 1). We sequenced the G. oxydans B58 genome and identified 3,283 open reading frames (FIG. 1A). Following the recommendation of Monte Carlo simulations, we constructed a saturating coverage transposon insertion collection (the progenitor collection; PC) containing 49,256 mutants (FIG. 1B).

[0043] The progenitor collection catalog indicates that we were able to generate at least one disruption mutant for almost every non-essential gene in the G. oxydans genome. In total, we identified disruption strains for 2,733 genes out of the 3,283 genes in the G. oxydans B58 genome. Since every predicted gene contains at least seven AT or TA transposon insertion sites, the remaining 550 non-disrupted genes are likely to be essential. A Fisher's Exact Test for gene ontology (GO) enrichment representing 268 of the non-disrupted genes demonstrated significant enrichment in several essential ontologies, with the greatest enrichment in those relating to the ribosome and translation (FIG. 1C).

[0044] The progenitor collection catalog was used to create a condensed G. oxydans disruption collection with at least one representative per non-essential gene. 47 progenitor strains were verified by Sanger sequencing prior to condensing, of which 43 (92%) were confirmed to have the predicted transposon coordinate. We selected one mutant for all 2,733 disrupted genes, a second mutant for 2,354 genes, and a third mutant for 50 genes where mutant location information was poor. All mutants were struck out for single colonies, and 2-10 colonies per mutant were picked, depending on the predicted number of cross-contaminating disruption strains in the originating well. This condensed collection contains 17,706 mutants in 185 96-well plates.

[0045] The condensed collection catalog was validated by a second round of combinatorial pooling and sequencing. Of the 17,706 wells in the condensed collection, we were able to confirm the identity for 15,257. We confirmed 25 of these wells by Sanger sequencing, and 100% have the predicted transposon coordinate. Among these wells, we were able to verify the identity and location of 4,419 independent transposon insertion sites, representing a disruption mutant for 2,556 unique genes (FIG. 1D). 1,587 genes are represented by more than one disruption, and 3,317 of all disruptions occur in the first half of the gene.

### Genome-Wide Screening Discovers 165 Genes Significantly Linked to Acid Production

[0046] We screened the new G. oxydans B58 whole genome knockout collection for disruption mutants with differential acidification capability (FIG. 2). We used the colorimetric pH sensitive dyes Thymol Blue (TB) to screen for changes in final biolixiviant pH (FIG. 2A), and Bromophenol Blue (BPB) to screen for changes in rate of acidification (FIG. 2B).

[0047] In total, we observed 304 genes that apparently controlled acidification (FIG. 2C). The TB screen discovered 282 genes whose disruption leads to a differential change in biolixiviant acidity (FIG. 2C). 47 mutants produced a more acidic biolixiviant, while 235 produced a less acidic one (FIG. 2C). The BPB screen identified 82 gene disruptions with differential rate of acidification: 49 with a faster rate, and 33 with a slower rate. 60 mutants were identified by both screens (FIG. 2C). Overall, we identified 165 genes that statistically significantly changed the final biolixiviant pH, rate of acidification, or both, but did not change the growth rate (FIG. 2C). We re-arrayed disruption strains with differential acidification into new 96-well plates alongside proxy wild-type (pWT) strains that have a transposon insertion in an intergenic region and show non-differential growth or biolixiviant production. The new collection was re-assayed with the TB and BPB assays and the strength and significance of each result was determined by comparison with pWT through a Bonferroni-corrected t-test. Mutants that cause the 25 largest reductions, and 50 largest increases in endpoint acidity yet do not affect growth rate are shown in FIG. 2D. 31 mutants that cause significant changes in acidification rate without changing growth rate are shown in FIG. 2E. However, 14 of the faster strains, including δGO_868, a disruption of a LacI type transcriptional repressor which was the fastest strain, produced a less acidic biolixiviant than the wild-type, indicating that targeting these genes for engineering a faster acidifier would likely be at the expense of a more acidic biolixiviant. None of the strains with a faster rate of acidification also created a more acidic biolixiviant. These results indicated that multiple genetic engineering interventions are needed to construct a strain of G. oxydans that simultaneously produces a more acidic biolixiviant than the wild-type at a faster initial rate.

### Phosphate Transport and PQQ Synthesis are the Biggest Controllers of Acidification

[0048] We used gene ontology enrichment to determine which biological processes, metabolic functions, and cellular components the most significant gene disruption mutants are involved in (FIG. 3). Among the disrupted genes that led to a stronger acidity (FIG. 3A), the most significant enrichment for all three GO categories involves the phosphate-specific transport system, represented by pstA, pstB, pstC, pstS, and phoR. Other enriched ontologies include those related to phosphate signaling and binding.

[0049] Among the disrupted genes that led to a weaker acidity, several enrichment groups are related to the synthesis or use of the redox cofactor, PQQ, represented by pqqB, pqqC, pqqE, tldD, and mgdh (FIG. 3B). Other enriched ontologies include those related to carbohydrate metabolism.

[0050] Acidification rate is controlled by carbohydrate metabolism and respiration. Disruptions in the pentose phosphate pathway increase acidification rate (FIG. 3C). Meanwhile, disruptions of the electron transport pathway components are the most significantly enriched group of mutants that decrease acidification rate (FIG. 3D).

### Single Gene Knockout Mutants can Significantly Change REE Bioleaching

### Validation of Dye Assays by Direct pH Measurements

[0051] We selected 14 strains with some of the most significantly increased or decreased acidification for further testing (FIGS. 2D and E). Dye pH measurements were validated by direct pH measurements. 11 of the 13 strains that produced significantly lower pH biolixiviant in TB assays did the same in direct pH measurements. The most acidic biolixiviant was produced by a disruption in the phosphate transport gene, δpstC at pH 2.09 (FIG. 4A). 4 of the 11 mutant strains that produced a more acidic biolixiviant were disrupted in genes involved in the pst phosphate-specific transport system (δpstA, δpstB, δpstC, and δpstS).

[0052] Additional disruptions that led to a more acidic biolixiviant included those in a hypothetical protein with no similarity to anything previously characterized (δGO_1415S); a gamma-glutamyltranspeptidase (δggtl); a periplasmic chaperone (δsurA); an HTH-type transcriptional regulator (δpetP); a two-component system sensor histidine kinase (δykoH); a Pyridoxal 5-phosphate (PLP)-dependent ornithine decarboxylase (δspeC); and a TPR domain protein that is a putative component of the TonB iron uptake system (δtonB).

[0053] 9 of the tested strains produced biolixiviant significantly higher in pH than pWT (FIG. 4B). The most alkaline biolixiviant was produced by a disruption in the PQQ synthesis system, δpqqC. at pH 4.71. While δpqqC produced very little acid, this is below the pH of glucose in media alone, indicating that some bacterial acidification still occurred. 3 of the 9 mutants that produce reduced acidity biolixiviant either synthesize PQQ (δpqqC and δtldD), or use it as a cofactor (δmgdh). Additional disruptions that led to a more alkaline biolixiviant than pWT include a Fructose-bisphosphate aldolase class II (δGO_3252); a GTP and nucleic acid binding protein (δchF); a lipid A biosynthesis protein (δhtrB); a peptide chain release factor (δhemK); the LacI type transcriptional repressor that increases initial acidification rate (δGO_868); components of a proteolytic complex (δtldD and δtldE); and the glucose dehydrogenase (δmgdh).

### Disrupting the Phosphate Transport System Significantly Increases Bioleaching

[0054] We tested if 10 of the mutants that produced a more acidic biolixiviant could bioleach REE from retorted phosphor powder (RPP) from spent fluorescent lightbulbs more efficiently than pWT (FIG. 4C). For each mutant, the elemental composition of REE leachate was similar to previous reported values. Six of these mutants significantly increased bioleaching. Two of the better bioleaching mutants disrupted the pst phosphate transport system (δpstC and δpstB). Overall, we found that bioleaching efficiency correlates with biolixiviant pH, as expected (FIG. 4E).

[0055] The δpstC mutant produced the most acidic biolixivant, and extracted the most REE from RPP: 5.5% total extraction efficiency as compared with pWT's 4.7%. Stated differently, δpstC removed 18% more REE from RPP than pWT. This increase in REE extraction remains significant even under a Bonferonni correction, the most stringent statistical test for significance. Without the adjustment, six of the better acidifiers were also better bioleachers than pWT (FIG. 4C). The remaining better bioleachers increased REE extraction by between 11% (δspeC) and 18% (δggtl) (FIG. 4C).

[0056] Without intending to be bound by any particular theory, it is considered that disrupting the phosphate transport system de-represses acid production in G. oxydans. Six of the disruption strains that resulted in a lower biolixiviant pH (δpstC, δpstB, δggtl, δpstA, δpstS, and δykoH), including three that increased bioleaching (δpstC, δpstB, δggtl), are involved in phosphate transport, sensing and signaling.

[0057] In its natural environment, G. oxydans produces biolixiviants to liberate phosphate from minerals, not metals. Under phosphate-limiting conditions, the PstSCAB phosphate transporter will activate the histidine kinase, PhoR, which in turn phosphorylates the transcription factor PhoB, and activates the pho regulon, enabling phosphate assimilation and uptake. Under sufficient phosphate conditions, PhoB is deactivated by PhoR, which in turn inhibits expression of these genes. Without intending to be constrained by any particular view, it is considered that disrupting any of these genes prevents G. oxydans from sensing when it has released adequate phosphate and when to stop producing biolixiviants.

### Disrupting Mgdh and PQQ Synthesis Genes Significantly Decreases Bioleaching

[0058] We also tested REE extraction by 4 mutants that produce a less acidic biolixiviant than pWT. Even under the most stringent statistical test, the Bonferonni correction, they were all worse bioleachers than pWT (FIGS. 4C and D).

[0059] The δmgdh mutant was the worst bioleacher of all tested, considering its lack of gluconic-acid production. δmgdh reduced bioleaching by 97%. Disruption mutants that knocked out synthesis of mGDH's essential redox cofactor, PQQ, also produced significant reductions in biolixiviant acidity. δpqqC reduced bioleaching by ≈94%. While bioleaching by δmgdh and δpqqC was negligible compared to pWT, they were able to bioleach a statistically significant amount of REE compared to glucose alone. This indicates, that a bioleaching mechanism independent of mGDH exists in G. oxydans (FIG. 4D).

[0060] Disruption mutants in tldD and tldE were also much worse at bioleaching than pWT. δtldD reduces bioleaching by 92%, while δtldE reduces it by 63% (FIG. 4C). It is considered that TldD and TldE may contribute to the supply of the PQQ cofactor to mGDH. δtldD strongly attenuates acid production (FIG. 4B), and the gene has already been implicated in PQQ synthesis in G. oxydans 621H. In E. coli, TldD and TldE form a two-component protease for the final cleavage step in the processing of the peptide antibiotic, Microcin B17. In a similar manner, PqqF and PqqG from Methylorubrum extorquens form a protease that releases PQQ in the final step of its synthesis. It is considered that TldD in G. oxydans may play the same role as PqqF from M. extorquens, while TldE plays the same role as PqqG. Deletion of pqqF in M. extorquens completely inhibits final cleavage of PQQ, while we find that disruption of tldD in G. oxydans reduces REE bioleaching by 92%. Moreover, deletion of pqqG in M. extorquens only reduces PQQ cleavage to 50%, while disruption of tldE only reduces REE bioleaching by 63%. These parallels strongly indicate a novel role for TldE in the biosynthesis of PQQ in G. oxydans.

[0061] It will be recognized from the foregoing description that bioleaching has the potential to revolutionize the environmental impact of REE production, and dramatically increase access to these critical ingredients for sustainable energy technology. The present disclosure related to this potential by providing for improved bioleaching by genetic engineering.

[0062] By constructing a whole genome knockout collection for G. oxydans, we are able to characterize the genetics of this process with high sensitivity and high completeness. In total we identified 165 gene disruption mutants that significantly change the acidity of its biolixiviant, rate of production, or both.

[0063] REE bioleaching by G. oxydans is predominantly controlled by two well-characterized systems: phosphate signaling and glucose oxidation that is supported by production of the redox cofactor PQQ. Interrupting phosphate signaling control of biolixiviant production by disrupting a single gene (pstC) can increase REE extraction by 18%. Disrupting the supply of the PQQ cofactor to the membrane bound glucose dehydrogenase reduces REE extraction by up to 92%.

[0064] Comprehensive screening of the G. oxydans genome also discovers completely new targets that contribute as much to REE bioleaching as previously characterized ones. For example, disrupting GO_1415, which encodes a protein of completely unknown function, increases REE bioleaching by 15%. Additionally, these results highlight the potential for a previously uncharacterized role of TldE in PQQ synthesis.

[0065] The discovery of the potential contribution of TldE to PQQ biosynthesis may allow for marked enhancement of the cofactor production through the additional over overexpression of this gene, and a consequent increase in dehydrogenase activity, including production of gluconic acid by mGDH and any useful downstream products. PQQ is an essential cofactor important for several other industrial applications of G. oxydans, including production of L-sorbose. Furthermore, PQQ alone has many applications across many biological processes from plant protection to neuron regeneration.

[0066] Without intending to be bound by any particular theory, it is believed that the present disclosure provides the first demonstration of improvement of bioleaching through genetic engineering. Furthermore, the creation of a whole-genome knockout collection in G. oxydans can facilitate its use as a model species for further studies in REE bioleaching and other industrially important applications of similar acetic acid bacteria. The findings of the two major systems contributing to acidification in G. oxydans according to this disclosure show that, for greatly improving bioleaching: reduce inhibition of regulation of acid production by disabling the phosphate-specific transport system, while over-expressing mgdh along with the expanded synthesis pathway for its cofactor PQQ.

### Materials and Methods

[0067] Gluconobacter oxydans B58 Genome Sequencing

[0068] Gluconobacter oxydans strain NRRL B-58 (GoB58) was obtained from the American Type Culture Collection (ATTC), Manassas, VA. In all experiments, G. oxydans was cultured in yeast peptone mannitol media (YPM; 5 g L⁻¹ yeast extract, 3 g L⁻¹ peptone, 25 g L⁻¹ mannitol), with or without antibiotic, as specified.

[0069] Genomic DNA was extracted from saturated culture using a Quick-DNA Miniprep kit from Zymo Research (Part number D3024, Irvine, CA). Genomic DNA library was prepared and sequenced using a TruSeq DNA PCR-Free Library Prep Kit (Illumina, San Diego, CA).

[0070] The prepared library was sequenced on a MiSeq Nano (Illumina, San Diego, CA, USA) with a 500 bp kit at the Cornell University Institute of Biotechnology (Ithaca, NY, USA). Resulting paired end reads were trimmed using Trimmomatic and assembled with SPAdes using k-mer sizes 21, 33, 55, 77, 99, and 127, and an auto coverage cutoff. Assembly quality was checked with QUAST and genome completeness was verified with BUSCO using the proteobacteria_odb9 database for comparison. The resulting 62 contigs were annotated online using RAST (rast.nmpdr.org).

### Gene Ontology Enrichment

[0071] DIAMOND was used to assign annotated protein models with a closest blast hit using the uniref90 database, an E-value threshold of 10⁻¹⁰, and a block size of 10. InterProScan (version 5.50-84.0) was used to assign family and domain information to protein models.

[0072] Output from both of these searches was used to assign gene ontologies with BLAST2GO. Gene set enrichment analysis was done with BioConductor topGO package, using the default weight algorithm, the TopGO Fisher test, with a p-value threshold of 0.05.

### Mating for Transposon Insertional Mutagenesis

[0073] The transposon insertion plasmid, pMiniHimarFRT was delivered to GoB58 by conjugation with E. coli WM3064. E. coli WM3064 transformed with pMiniHimarFRT was grown overnight to saturation in 50 mL LB (10 g L⁻¹ tryptone, 5 g L⁻¹ yeast extract, and 10 g L⁻¹ NaCl) supplemented with 50 μg mL⁻¹ kanamycin (kan) and 90 μM diaminopimelic acid (DAP), rinsed once with 50 mL LB, then re-suspended in 20 mL YPM.

[0074] We used a Monte Carlo numerical simulation (collectionmc) to approximate how many insertions would need to occur before a mutant is found representing a knockout of each gene in the genome. Our calculations demonstrated that we would be able to identify mutants in at least 99% of all G. oxydans B58 genes if we generated and selected at least 55,000 mutants (FIG. 1B).

[0075] GoB58 was grown for approximately 24 hours in YPM, then back-diluted to an optical density (OD) of 0.05 in 750 mL YPM and incubated at 30° C. for two doublings until the OD reached 0.2. GoB58 culture was distributed into 13 50 mL conical tubes, to which rinsed and re-suspended WM3064 was added at a ratio of 1:1 by density (approximately 1 mL WM3064 to 50 mL B58). Bacteria were mixed by inversion then spun down at 1900 g for 5 minutes. Supernatant was poured off, and the mixture was resuspended in the remaining liquid (≈0.5 mL), pipetted onto a YPM plate in 5 spots of 0.1 mL, and allowed to dry on the bench under a flame.

[0076] Mating plates were incubated at 30° C. for 24 hours. Mating spots were collected by adding 4 mL YPM to a plate, scraping the spots into the liquid, then suspending by pipetting up and down several times. Suspended cells were collected from each plate, and the suspension was plated onto YPM agar with 100 μg mL⁻¹ kanamycin at 100 μL per plate.

[0077] After 3 days of incubation at 30° C., colonies were picked into 96-well microplates using a CP7200 colony picking robot (Norgren Systems, Ronceverte WV, USA). Each well contained 150 μL YPM with 100 μg mL⁻¹ kanamycin. For all experiments, GoB58 was grown in polypropylene microplates sealed with a sterile porous membrane (Aeraseal, Catalog Number BS-25, Excel Scientific) and incubated at 30° C. shaking at 800 rpm. Isolated disruption strains were grown for three days to allow nearly all wells to reach saturation. Wells B2 and E7 of each plate were reserved as no-bacteria controls.

[0078] In total 18 matings were required to recover and pick a progenitor collection of 49,256 disruption strains into 525 microplates over the course of about two months. Microplates with saturated wells were maintained at 4° C. for up to 3 weeks and incubated an extra night at 30° C. before pooling.

[0079] Combinatorial pooling which was done in three batches. The 525 plates were virtually arranged in a 20 by 27 grid, and combinatorial pooling, cryopreservation, pool amplicon library generation, and sequencing were all done as previously described.

### Curation of a Whole-Genome Knockout Collection

[0080] Sequencing data for the progenitor collection was processed into a progenitor collection catalog using the KOSUDOKU suite of algorithms. To create a condensed collection, a disruption strain was chosen for each of the 2,733 disrupted genes available in the progenitor collection, first prioritizing close proximity to the translation start, then the total probability of the proposed progenitor collection address. A second strain was chosen from the remaining strains for each gene that had another available. For 50 genes, both disruption strains selected were ambiguously located, and thus a third strain was selected from the remaining collection.

[0081] In total, 5,137 disruption strains were isolated and struck-out for single colonies. Many progenitor wells were predicted to have more than one possible strain per well, so for each strain, the number of colonies isolated was two times the predicted number of strains in the progenitor well, up to ten. The condensed collection, which amounted to 17,706 wells, was pooled, sequenced, and validated as previously described. Unknown disruption strains significantly linked to acidification were identified with Sanger sequencing, also as previously described, with the exception of the transposon-specific primers. For the first and second rounds of nested PCR, the transposon-specific primers were (5′-GTATCGCCGCTCCCG-3′ (SEQ ID NO: 309), and (5′-CATCGCCTTCTATCGCCTTC-3′ (SEQ ID NO: 310)), respectively.

### Thymol Blue Endpoint Acidity Assay

[0082] Endpoint acidity was measured using the pH indicator thymol blue (TB, Sigma-Aldrich, St. Louis, MO), which changes from red to yellow below a pH of 2.8 (www.sigmaaldrich.com/US/en/product/sial/114545). The lowest pH of biolixiviant generated by GoB58 was 2.3 (Reed2016a), thus TB allows for distinguishing strains that lower the pH below that of the wild type biolixiviant. To generate biolixiviant, the condensed collection was pin replicated into new growth plates containing 100 μL YPM with 100 μg mL⁻¹ kanamycin per well. After two days of growth, an equal volume of 40% w/v glucose was added to the cultures for a final solution of 20% w/v glucose. The amount of glucose needed to lower the pH below 2.3 via the production of gluconic acid was estimated to be 13% w/v, but the higher concentration was used to account for any use of glucose as a carbon source and still maintain an excess amount. Viability tests demonstrated that the bacteria were still viable after two days of culture in such a solution (data not shown).

[0083] Bacteria were incubated with glucose for 48 hours to allow acid production to reach completion. Plates were then centrifuged for 3 minutes at 3200 g (top speed) and 90 μL of the biolixiviant supernatant was removed and add to TB at a final concentration of 40 μg mL⁻¹. After 1 minute of vortexing, absorbance was measured for each well at 435 nm and 545 nm on a Synergy 2 plate reader (Biotek Instruments, Winooski, VT, USA). Because of variation in background absorbance from well to well on each plate, absorbance was measured at these two wavelengths, and their ratio was used as a proxy for pH, which correlates linearly within the range of pH for the majority of biolixiviants produced by the collection.

### Bromophenol Blue Acidification Rate Screen

[0084] Acidification rate was measured using the pH indicating dye, Bromophenol Blue (BPB). Knockout collection strains were grown for two days. OD was measured at 590 nm for each well, then 5 μL of culture was transferred to a polystyrene assay plate containing 95 μL of 2% w/v glucose and 20 μg mL⁻¹ BPB in deionized water. The initial pH of the culture is just above 5, and within moments of adding culture to glucose with BPB, the color begins to change rapidly. Assay plates were vortexed for one minute after addition of bacterial culture, then immediately transferred to a plate reader where the change in color was tracked by measuring absorbance at 600 nm every minute for 6 minutes, resulting in 7 reads. Mean rate (V) and R-squared were calculated by the Gen5 microplate reader and imager software (Biotek Instruments). A plot of all V relative to OD demonstrated that the two are correlated, thus V was normalized to OD for each well.

### Hit Identification in Acidification End Point and Rate Screens

[0085] Once every well had its assigned data point (A435/A545 for TB, and V/OD for BPB), hits were determined by first identifying outliers for each plate. The interquartile range and upper and lower bounds were calculated in Microsoft Excel considering all wells with cultured disruption strains. Any data point that was more than 1.5 times over or under the upper or lower bound, respectively, was considered an outlier. A disruption strain was considered a hit if over half of the wells for that strain (or 1 of 2) were outliers.

Acidification End Point and Rate Quantification with Colorimetric Dyes

[0086] For each assay, knockout strains identified as hits were isolated from the knockout collection into new microplates, along with several blanks per plate, and proxy wild type strains—GoB58 strains with an intergenic transposon insertion that should not affect the acidification phenotype. OD and acidification phenotypes were measured for each proxy WT strain separately to verify that growth and acidification are unaffected in these strains.

[0087] Acidification phenotypes for the disruption strains were compared to that of proxy WT with a Student's t-test in Microsoft Excel, two-tailed with equal variance. A Bonferroni correction was used to determine significance to account for the possibility a comparison is significant by chance alone: a phenotype was considered significant if p>0.05/n, where n is the number of comparisons being made (n=120 or n=242 for endpoint acidity comparisons with pWT set A or set B, respectively; n=60 for rate of acidification comparisons with pWT).

### Choice of Proxy Wild-Type Comparison

[0088] The biolixiviant end point pH and acidification rate of each G. oxydans mutant were compared against a proxy wild-type set of mutants for each phenotype. To account for the presence of a kanamycin cassette in the genome, the proxy wild-type set for each phenotype was constructed of several mutants with the transposon inserted in an intergenic region, that had no growth defect, and no apparent change in phenotype.

[0089] As the efficiency of the E. coli WM3064 to G. oxydans mating was low, we constructed the G. oxydans progenitor collection in 18 mating batches. As a result of this, the possibility existed that there might be slight variations in the wild type background from batch to batch.

For the acidification rate, we found that these variations did not affect the wild-type behavior across the collection, and a single set of proxy wild-type strains could be used as a comparison with notable disruption strains in the quantification assays. For the end point pH measurement, we found two distinct proxy wild-type behaviors in the condensed collection. For plates 1 to 76; 110 to 130; and 160 to 185, we used proxy wild-type set A, and for plates 77 to 109 and 130 to 159 we used proxy wild-type set B.

[0090] For both wild-type sets, we compared ODs after two days of growth, and endpoint acidity using the TB absorbance ration (A435/A545). For wild-type set A, which we used for the BPB quantification assay, we also compared acidification rate of individual proxy WT strains of set A. Comparisons were all made using a linear model, one-way ANOVA, and post-hoc Tukey HSD in R.

### Direct Measurement of Biolixiviant pH

[0091] Bacteria were grown for 48 hours in tubes containing 4 mL YPM with 100 μg mL⁻¹ kanamycin. One tube was left uninoculated as a no-bacteria control. OD was normalized to 1.9 and diluted in half with 40% glucose for a final 20% solution in 1.5 mL. Five replicates were created for each strain and controls, and all mixtures were randomly distributed across two deep well plates. 750 μL of mixture was transferred from each well to a second set of deep-well plates for bioleaching experiments. All plates were incubated shaking at 900 rpm at room temperature.

[0092] After two days, one set of deep-well plates was centrifuged for 10 minutes at 3200 g (top speed), and the pH of the supernatant was measured by insertion of a micro-probe to the same depth in each well.

[0093] Four standards were used for meter calibration—pH 1, 2, 4, and 7—and the meter was re-calibrated after every 12 measurements. pH measurements for each disruption strain were compared with those of proxy WT using a Student's t-test in Microsoft Excel, two-tailed, with equal variance. A biolixiviant pH was considered significantly different if p<0.05/n, with n=27.

### Direct Measurement of REE Bioleaching

[0094] The second set of deep-well plates was centrifuged for 10 minutes at 3200 g (top speed), and 500 μL of biolixiviant was transferred from each well to a 1.7 mL Eppendorf tube. 20 mg (4% w/v) of retorted phosphor powder was added to each tube for bioleaching. Tubes were shaken horizontally for 36 hours at room temperature, then centrifuged to pellet remaining solids. Supernatant with leached REE was filtered through a 0.45 μm AcroPrep Advance 96-well Filter Plates (Pall Corporation, Show Low, AZ, USA) by centrifuging at 1500×g for 5 minutes.

[0095] All samples were diluted 1/200 in 2% trace metal grade nitric acid (Thermo Fisher Scientific) and analyzed by an Agilent 7800 ICP-MS for all REE concentrations using a rare earth element mix standard (Sigma-Aldrich) and a rhodium in-line internal standard (Sigma-Aldrich). Quality control was performed by periodic measurement of standards, blanks, and repeat samples

[0096] An additional 1/20 dilution in 2% nitric acid was analyzed for mgdh and pqqc disruption strains, and the no-bacteria control (glucose).

[0097] Bioleaching measurements for each disruption strain were compared with those of proxy WT or glucose using a Student's t-test in Microsoft Excel, two-tailed, with equal variance. Total REE extracted was considered significantly different if p<0.05/n, with n=12 for those compared to pWT, and n=2 for those compared to gluco

The application's sequence listing, which the Patent Office published only in electronic form, follows.

SEQUENCE LISTING (310 sequences)

SEQ ID NO: 1 - DNA, 477 bp, Artificial Sequence
  Description of Artificial Sequence: Synthetic polynucleotide
ccgaaggcatcgtttacggtgctctcgaagtcatgcgccgtcgcggcggcacgactgcagatccggtggccatgttccactcggctctggataacgtgaagcctgcggttgaagtccgctcgcgtcgcgtcggtggcgcaacctatcaggttccggttgaagtccgcgccgagcgccgtcaggctctcgcgatccgctggctgatcgatgcctcccgcaagcgtggcgagaacacgatgcaggagcgtctgtccaacgaactgatggatgcggtcaacaaccgtggctccgctgtcaagaagcgcgaagacacgcaccgcatggctgaagccaacaaggcattcagccactatcgctggtaatcagaaccggttaaagggcttccggcagtgtgtcgatctcaggatcgtgcactgactggtttgaactttcagtcttactcccgttccaggtggagcggggttttggagaaagacg

SEQ ID NO: 2 - DNA, 525 bp, Artificial Sequence
  Description of Artificial Sequence: Synthetic polynucleotide
ggaactgactcctgatttcgttctgttttcatgggatcaatgaacggtcaggcgaaaatgttgcatcggggtgcaggaaatttcccgaaaaaaggaaaagacaggctggagcccgcggaaatcaggcaaaaatcaggtgatatttttttcggattccgtttccggaggttcggtatttttcgtcgcaagctcggcgagctgggctcgggcacgggaaacacgggccctcatcgttccggcgggcacatcgcagacgcgggcggcatcttcataggacagttcctgtgctcccacgagaatcagggcctcccgcaacagatcgggcagcttccacagcagttctcccaggtcctgaacggcatcgcgggcattctggcgtgacggtgcagccgtggaaggctgcatgtcctgctcgatgtcgagcatgatttcctgctcgcggctgcgacggcgcgtctgctcgtagaaggcatttctctgtattgtgaacagccaggctttgaggaccgttccctgctggaactg

SEQ ID NO: 3 - DNA, 506 bp, Artificial Sequence
  Description of Artificial Sequence: Synthetic polynucleotide
gtggcagatgttgagaaatatccgcagttccttccctggtgtgtgaaggcaagcatccggacccagacggaacaggagcttgtggcggatctgacgatcgggttcggcccgttccgcgagaccttcaccagccgcgtgacgctggagcggccttcgcgtatccgggtgcgctacgagaaagggcctttccgttacctgaataatgtctggacgttcacgccggatccgcggggctgtctggtcgatttcttcgtggatttcgagttccgttcgcgccttctgcagaatgcgatgggtgtcgtgttcaatgagggcgtgcgcctgatggtctccgccttcatcaagcgggcacgggacatttacggcacgcaggcgacgaaagcggtccccccggcaccgggcctttcccaaaggacataaaatttcgtattatttccacaaccattcggtgcgtgggccgttacaggtctcaagcaccgtcatggtgacatgaaaaggattacgta

SEQ ID NO: 4 - protein, 559 aa, Gluconobacter oxydans
MAAYQYVYVMKDLTKSYPGGREVFKGITLSFLPGVKIGVLGVNGAGKSTLLKIMAGIEKEYGGEAWAAEGARIGYLEQEPKLDESLTVGENVAQGFGELKKAVDRFNEISMKFAEPMSDDEMTALLAEQADLQEKIDAGDGWELDRKLEIALDALRCPSADSPVTNLSGGEKRRVALCRLLLEKPDILLLDEPTNHLDAESVSWLEKTLRDYAGTVMVITHDRYFLDNVTNWILEIERGRGYPFEGNYSSWLTQKRKRLAQEEKEESSRQRALAAEQEWISSSPKARQAKSKARITKYEEMLAANAEKAGGTADIVITPGPRLGGTVIEAENLTKGFGDRLLIDNLSFKLPPGGIVGVIGPNGAGKSTLFKMITGDDQPDSGSLKIGETVKLGYVDQSRNTLDDSKTVWEEISGGTDVIQLGKRTVPSRAYVGAFNFKGSDQQKRVGVLSGGERNRVHLAKMLKQDSNVILLDEPTNDLDVDTLRALEDALAEFAGCAVIITHDRWFLDRLATHILAFEGDSHVEWFEGNFQDYEADKRRRLGPDATEPGRIKYRPLAR

SEQ ID NO: 5 - protein, 333 aa, Gluconobacter oxydans
MIDPQNVLPYRVTDRNLALELVRVTEAAAIASAHWTGRGQKNEADGAAVQAMRAAFDTVAIDGVVTIGEGEMDEAPMLYIGEKVGSGGPAMDIAVDPLEGTNLCAKSLPNALTVVALAERGKFLHAPDIYMEKIVVGPDLPEGVVDLDASIGNNLRSLAKAKKRDVSDMVLCALDRERHEELIAHAREAGARVMLLSDGDVAAAIATCVDGGGVDLYAGSGGAPEGVLAAAAIRCMEGQMQGRLLFEDDTQRERAREMANGLDPARKLFLHDMASGHVLFSATGVTSGPLLKGVERPSPSRARTHSIVMRSKSGTVRYIESHHTFKPKVKAAS

SEQ ID NO: 6 - protein, 81 aa, Gluconobacter oxydans
MDLCWTTSCRSTTSRGRAATSACRDYTASHHDHSPPTIGATLRNGALATPRLCLGAGPLVLDSARLHLAKRLVAALVNSFV

SEQ ID NO: 7 - protein, 370 aa, Gluconobacter oxydans
MQVALEPETLPATIFRSEAVRQMRFPFQKAFLLCAMTAMGLGSAKAQYAGHISSYVMDARTGAVLSATDAELQRYPASLTKLMTLYLTFRALEAHQITLDEQVPVSIHASIQAPSKLGLVPGTRLTVEQGILGLVTKSANDAACALGEFLGGGDEVRFAQLMTQQARALGMTNTTFRNASGLPDPDQVTTAHDLALLSQHLISDFPQYYHYFNVPSFYFHRRMVPNHDPMLKIYAGADGLKTGYTDLAGHNLITSAQRGNVRLIGVVMGAPNNTRRSMEMVSLLDKGFADEGVAPQPLLHPVAPSGVLMASARRRGHFRHSVLLASSRPMEVADAPTSPRRYGRISHHGAAVRMVSARHVVAHKKRSRHS

SEQ ID NO: 8 - protein, 222 aa, Gluconobacter oxydans
MICRFSPKVTLSLLSACLLTGPVAMTALSSVALAQTAGAVSPADAASAVTPISALYDALKAAQKTGKTAQQRATMIAPAVDRAFDLEAILRRSVGVRYNSLSPSDRTRLLGSFRQFTIARYASSFKPEAPAAFTVSPQTRPNPTGGLIVDTTIGGTDGGDVTPIDYIMTNGTSGWRITDVLLNAHISQVAAQRADFGGALSSGGASGLADHLDSKTAHFLHD

SEQ ID NO: 9 - protein, 315 aa, Gluconobacter oxydans
MRIALIHNARSRKNRRNGSSFAVEAQALLGKDFVPSDTREGTTEHVRQLYERGIDTILIDGGDGTVSTALTAIARAYPADRLPDIVVLASGNTNLIAGDVGFGLRGMEAIQRLRQGDLRSSVRTPIRLSWPGTDRMPVLGLFGGCAGYARAVRIAHSPTVLRFAPHDLAVGITLLSTFVSLMFRKSREEWLRGDPLRIETGGHVYDGQSFMFLTTGLSHLSRGIWPFWDAEPNVEGLRYLDVSAWPDSLLRATAALLCGRAPRWLRRHPDYVSGRTDDMTLVTESDFVLDGEVFSAAPGGVLRLERASRFRFLHA

SEQ ID NO: 10 - protein, 407 aa, Gluconobacter oxydans
MAGGLLVGMGILAAGTTLAAARHIGDGSLAFSLLRAGSRAGVVGGLADWFAVTALFRHPLGLPIPHTAILPRQKERLGQALGRFISGQFFTEDDVRRALSKIDLSGLIADMLNDPANRQTLVTSMRSAIPLMFDRMEDGRAKTAISRALPVLLNGEEMAPLVSRGMRAMVDSEMHQEVLSFLLERIKTTVTSRESDLRHFVEERVREQGGRFLGWAIGGSVASRVLMALHAEFERVDPMDSELRHGFTTWVRGEIDRIENDPARRKDMADTITSVLTHTSLKGWSSELWDRLRRMVEEDSGREDGWSATVIDAAIVQLASALRSNESLRLKVNQAVESTVQRILPGLREKLSGFIAAVMAGWDGNDLAARLESRVGRDLAYIRINGTVVGFLAGAALDGVSRLFFGV

SEQ ID NO: 11 - protein, 792 aa, Gluconobacter oxydans
MYAVKESLESHLSAKTTSGPSKPRTTATPRRGRPSASRTAAAATSPTVADKGETSPVTETPASKAPRTRRTKTAATATEKTAEVKTPARRTRKAATPAAESATESEAPAPKTTGRRKKAVTEPEAVTELAEAAVAAPAPRRRRSTKAPEAVTEEAEAAPKRRGRPRKTPVVEQPAAEVITEETVKAPAAPRRRGRPRKVDVAVAETPVEAPVEKKARQSRRKASAPVMEAPEPAAEETPAVQTESTKGEKPARRRRTKAAAATSAVVEKTVEAPAVVETIVVAEDVSDRPRFADLGLGEPIMRAIEELGYEHPTPIQAQAIPEVLKGHDVLGVAQTGTGKTASFTLPMLQKLAGSRARARMPRSLILEPTRELALQVAENFKLYGKYLRLTHALLIGGESMAEQRDVLNRGVDVLIATPGRLLDLFGRGGLLLTQTSTLVIDEADRMLDMGFIPDIEKIVALLPAHRQTLFFSATMAPEIRRLADAFLRHPVEITVSRQSSVATTIEEALVIVPEDEKRRTLKKLLRRENVQSAIVFCNRKRDVDMIQQYLTKHGIEAGHLHGDLAQSLRFSTLERFRSGDLKFLVCSDVAARGIDIGGLSHVFNYDLPFNAEDYVHRIGRTGRAGNEGHAFSLATPRDRRLLEAIETLTGKVIARPVLEGITTVDWAPEDGERRPAETATPAPQDVAEEGEQRLRKRRRGGRKRNRGDRDENETVQEVAPTAVASVAVIEAPVSHRSVELAPAFENDGPKTGFGGDTPAFMLVPRRRKVTVSGSTDPAAPVQHDGRHYGNE

SEQ ID NO: 12 - protein, 160 aa, Gluconobacter oxydans
MPLFNPHDLRNLLQSGQRVLGLDPGSKTIGVALTDVSLMLASPLIGLKRRKLGENAQELAKIVRAQDVGALVVGLPLSLDGSFGPAARAASDWTQALSEKLGIPAGLWDERLSSSAVNRFLIKDADMTRGRRAEVVDKMAAAYMLQGWLDASRPESPEIF

SEQ ID NO: 13 - protein, 615 aa, Gluconobacter oxydans
MSLNSVVESVTARIIERSKISRRRYLALMERNRAKGVLRPKLACGNLAHAIAASSPDKPDLMRPTGTNIGVITTYNDMLSAHQPYGRYPEQIKLFAREVGATAQVAGGAPAMCDGVTQGQEGMELSLFSRDVIAMSTAVGLSHGMFEGVALLGICDKIVPGLLMGALRFGHLPAMLIPAGPMPSGLPNKEKQRIRQLYVQGKVGQDELMEAENASYHSPGTCTFYGTANTNQMMVEIMGLMMPDSAFINPNTKLRQAMTRSGIHRLAEIGLNGEDVRPLAHCVDEKAIVNAAVGLLATGGSTNHSIHLPAIARAAGILIDWEDISRLSSAVPLITRVYPSGSEDVNAFNRVGGMPTVIAELTRAGMLHKDILTVSRGGFADYARRASLEGDELVYSHAKPSTDTDILRDVAAPFRPDGGMRLMTGNLGRAIYKSSAIAAEHLTVEAPARVFQDQHDVITAYQNGELERDVVVVVRFQGPEANGMPELHKLTPTLGVLQDRGFKVALLTDGRMSGASGKVPAAIHVGPEAQVGGPIARVRDGDMIRVCAVTGQIEVLVDAAEWESRRPVPPPLPALGTGRELFALMRSVHDPAEAGGSAMLAQMDRVIEAVGDDIH

SEQ ID NO: 14 - protein, 291 aa, Gluconobacter oxydans
MVFSRMRASSGLPCAQADLDHVERIVTASGTSFARGMSILPPDRRQAMFAVYAFCRQVDDIADGDAGVADPMAALQEWHRRIDQLYEGVATDALDRILIVAIHRYQLQAKDFHDVIDGMAMDCGAPIVAPDEATLDLYCDRVASAVGRLSVCVFGDSSDNARRVAYHLGRALQLTNILRDIAEDAGRGRLYLPAELLTRFDVPKDPQEALYAHGLDQVARILAERAKDHFREARNAMRLCDSTAMRPARMMAASYAPILSALEKRGWKTPDIAPKVCKPWRQLRTLAAYVK

SEQ ID NO: 15 - protein, 438 aa, Gluconobacter oxydans
MGSKGHFMTTQDYKVRDITLADWGRKEISIAEGEMPGLMALREEYKDSQPLKGARIAGCLHMTIQTAVLIETLIALGATVRWSSCNIFSTQDHAAAAIAAAGIPVFAWKGLTEEEFNWCIEQTIHGPDGWTPNMILDDGGDLTIMMHDKYPEMLKDVRGISEETTTGVHRLWEMSKKGTLKVPAINVNDSVTKSKFDNLYGCRESLVDAIRRGTDVMMAGKVAVVAGYGDVGKGSAASLRNAGCRVLVTEVDPICALQAAMEGYEVVTMENAAPRGDIFVTCTGNVDIITIDHMREMKDRAIVCNIGHFDSEIQVEALRNYRWNNIKPQVDEIELAPNRRIILLSEGRLVNLGNATGHPSFVMSASFTNQTLAQIELWTAKPGQYEVKVYTLPKALDEKVAALHLAKVGAELSKMSQKQADYIDVPVNGPFKHEEYRY

SEQ ID NO: 16 - protein, 212 aa, Gluconobacter oxydans
MFSGIIERLGTVRSACVRDRAMDLTVETGFPDLELGESVAVNGVCLTVETFDAAGVATFHLSGETLSRTPLDQLKTGSRVNLERAVAASTRLSGHIVQGHVDGVATLASVEKAGDSYALRVFVPQALRQYVVEKGSITFDGISLTVNELHDDITRGNQAGFEVGLTIIPHTWEHTNLSTLSVGDRMDVEVDVLSKYVENLLRFSPSLGKVAS

SEQ ID NO: 17 - protein, 131 aa, Gluconobacter oxydans
MRRCVAAIRKAALFGLVFAGIAGAGSASAAEAAWTASKCGAEPQAPAVKAATVAQYNESVDRVTAYEKAARVYNACVSAQANREETAISQEASARISHVHAGSAAVQSHIAASFQTLSSNLAAASRKLGHH

SEQ ID NO: 18 - protein, 809 aa, Gluconobacter oxydans
MRSRYCLCATTALALSVSAAFAQSDVAPKSRSHRPTQTHKSAATKEDSPSMMGSTSPTDEARSETVRVQGSRRSSPGAGLMVHEDAAKSRSTVTQEFISKQTPGVNPMQLIAMLPGVNTTSVDPLGLNGGNMTMRGLNASQIGFTLEGFPINDIGNYAVYPQEIVDSENLRSITVEQGSADLDSPHISASGGAVNMYLLDPKDHFGGHLDGTYGSYNSRRIFGRMDTGKIGNTNLKGYVSFSAAHEDSWRGPGSQRKLHGETKWVNEWGQGNRISLAIVGNQSNSTLFPSMSLANWNKYGVNYTYTGKWNPSSPSTNYYKLHQNPFTNIYASAPSTFTLTDHLTLTETPYFWYGNGNGGGAYNESLSSQQYGAQTLSASIGQYNSSNTKSLLVYNPSNTQTYRPGAVTKLALHTGANRLMIGYWFEYSKQIQTSPYSLVNMATGTPLDVYGGGTNMVLSNGVTAEYRDTLTQTRIHTLFIDDSLSLLNNHLTLEAGLKYAMVARQGHNFLPDTSTGPYINGSWNEPLPAASIRYKLNNEIQLFASGTTNFRIPMNTALYDSGTYTSGSGYSTKANTNMKPEISISEEAGIRYQGALFNGTLSYFHYNFTNRLYSETVVQSNGAYYSTSVNGGSSHADGVDFEIGTRPILYHLRPYISAEYIDARTDSNVAAGGSTNDYVHSKGKFAPQTAKVQVAFNLDYDDGAFFSGFGLKYVGKQYATFNNDTSIPGYVTMDVHAGYRFRNYGVLKNPVLKLNIQNITNNHYLGFVNGTASNGKATTGVFGSAIAAGSTTYYVASPFFVGGSASVDF

SEQ ID NO: 19 - protein, 232 aa, Gluconobacter oxydans
MKKCHNPARLRGICRLAQDDRSQYIGIMRLLPTLPRLLLVAALAMTPTILVPWHHAQAQDADDAEAEQEAEAAQKKAEARKAAQRAAPPSALPGAEASDDDAGHARSDVNPTTALFDAINRGSLNAAKEALNRGADMGGHNVLDQTPLDMAIDLNRKDIMFLLLSMRTYNPDGKIENSVSDEGVEMKNGSGHLTIGGKSVTPKRSLVAASPHFDTSGGKPDPSVGFLGFAGH

SEQ ID NO: 20 - protein, 311 aa, Gluconobacter oxydans
MADYRLGIDLGGTKIEIAVLNRSGDLVLRERIPNPGIYNEAVLAIRDLVTDVDRRLGAVPSHRVSAGQHTSTLGIGIPGSISPETGLIKNANATWLNNQPFGQDLESALARPVRTENDANCFALSEAADGAAKGMLTVFGVIIGTGMGAAIVNNGRVLEGRHHIAGEWGHLPLPWPTEEDMPARDCFCGNKGCMERYLCGPALAADWKGPGHRNTAGIEDAAANGDQAAIAALGRYTERFARACAMVINFLDPDVIVLGGGVSNLHTLYERVPPLLAKHVITPVCTTPIVRNKHGDSSGVRGAAWLWDVTE

SEQ ID NO: 21 - protein, 1578 aa, Gluconobacter oxydans
MQKIFSLSEIGASDVSHDLVSFDIFDTLVYRRYLEVNEVHDLASAYALSLLGQFGKENPGALTLTRYDITNVMKAAAHERIEEPTLEAVWSRLFTARIGHTEKALTLGRKVAAFEYEIDRQNLYAVEGAAEMLAALKAQGKTVIAISDMYFSQTEIEGILLQTGLARHIDRVFVSSQENLTKHSGNLFTHVWKQFDIAPAKTLHLGDNTHSDVAMPTSLGGNAIHVAHAPLLRIKRPDYGRRPDIHMEIGDLSKLFLTQLLLCAQSDGSDRLFFLSRDGCLLHKVLEKWNSPLFRNFFTPIHSEDLFLSRAVTCWLNVNFQDKWLLQSIGHAFWLHHGKATPRQISGMLGIDATPAGLDADKVYHSSMDTFTVLEAYEASGLVEEIRTALLHKRAMAASYLKDAGVLNHQSVHVCDVGYSGTVVRDLNTFFLQEGPQGLGGSIPQVYFHCIASNANYSGNARTALPHVIFQKDVILNDGLLPGELKDSFAWLEMFFKHPLYGPLLGYRKDGDRTVPSYDVAAQEDPHHPCHLILNTIKSDPSDIVLLWMSAVGFWSQFTSPLIERFLNPDESTIEQMLSDVYEVDAVSGKTRSVVLVAPELSDDEIRHRAQREDYWIPGSLVASRLARTRSAFETDAEQKSLVNKLRALANGGTAGKGSKQAEKNQDAFDPAFYRRFYRDLSALPNDRALEDHYFTHGKLVGRYGSEAMMKREQAALEQRLPRDFDAGAYFMANPDLPVTQPVSWTATRHYLNIGAVQNRPYHYHFPGLDEAFEALLATNEISLSDAERKDYQDGVPARILLLRRLGAISAPWFNMLDLQEFSALNFEWCGKPASAAEAILTFLKDGIERIAPLSVSVAFDPDFYRRQYTDTADLSDVDAYRHWLEAGSLMHRAPSEEWALQHMIGQRTYPPAFHWDRFQATDRARFARSTRLDLLDAFLSTAVPPRDDLVGGPGAGDLWTWRAARAQGAGDQHLSTECLREAARVEPHRGVFWHTLGDRLQSQGDLHGALEAYTRCLKTDTPNRWSHINCIRLSADLGFYKKGLEHLRAAQAAWKEMQPWREARTHLFMRWFDHAAHHSYDRITQDDIRARTHPDARFLAFMNTFVPAVASIGIPAPLTLARTDGPILILSGSGLSERTRWEASLRIAPEDARQVIVFSREQVALFAESLPGASVALYHEVETDGLIVDTLLRAKALGVRNIYWAGPLGRDSTGEGPDLSDLAWSDFLLSRDSRETGRTLRSIHAATMCDDVVLTMPSLITRFHDLGLRPRLGVSALMEALADMPRTTETAPGKIRIFCSLTGRPVRVSTSDEDAYAPRIGQKALLKALDTLLETYPDVSLLVEGVDPALPLSIRNSTRIERLGSELTSDQRLAALSRSSIALDLRHVPRDQRSLADEATWSGIPCLVLSDNPALGSASTPGYAKWAQISEILKAWIGQPQTLEDVTLAARTHFEEAVSPTPVVWSPVRAVPTTKARPRILFANLFAPPQTTGGATRVLSDNAGYMLAHAGDDYDFAILASDDENSHRGVTRVDSWKGAPVFRIATPQEIDMDWRTYNSEVDAQTRRIITLFKPDLV

SEQ ID NO: 22 - protein, 398 aa, Gluconobacter oxydans
MIPALMPNYKRADLAFEQGEGVWLTATNGRRYLDFGAGIAVTSLGHAHPKLVKTIAEQAAKVMHVSNLYRIPQAEKLAELLVQNTFADSVLFCNSGAEANEGMVKMIRRAQFENGHPERTNILCFNGAFHGRTLAMISATGNPAYLKGFGPVVEGFDHAPFNNTNTLRDAITPHTAGIVVEPVQGESGIKPATREFMEGLRAVCDEYGLYLGFDEVQTGVGRTGKLFAHEWYGVRPDVISVAKGIGGGFPLGAVLATEELARHLTPGSHGTTFGGNPLACAAGVTVLEEILSPGFLEHVRSVGDAFGRMLEDVVSRSEGVFDNVRGIGLMRGLHCVPPVADVMQAVLNQELLTVSAGDNVLRLVPPLIVTETECREACERLVKAADSLKVPATQENAS

SEQ ID NO: 23 - protein, 135 aa, Gluconobacter oxydans
MSQETNAPELHQLTAQIVTAYVSNNDIPADALPALIRSVHDSLATVNVPEEAPVEKPVPAVSPRKSVFPDYIICLEDGKKLKLLRRHLKTAYNMTPQEYRERWGLPPEYPMVAPNYANHRSSLARKIGLGRRRED

SEQ ID NO: 24 - protein, 328 aa, Gluconobacter oxydans
MRYLVTGGAGFVGSHVVLALRDAGHDVVVLDNLSTGYREAVPAGVPFHKVDLLDYAATSAVVAQGNWDGVLHFAALSLVGDSMRDPFHYLRQNYLTALNLVQICAGHGVRKIVFSSTAALFGGPERLDPIPETAPVQPGSPYGESKFMIERVLHWADAIYGLRSACLRYFNAAGADPQGRAGEDHRPETHLIPLTIDAALGRRPALKLFGTDYPTRDGSCVRDYIHVTDLADAHIRALAQIDQRSVTYNIGNGHGYSNLEIIQSVERVSGRKVPWEPAPRREGDPALLVADSTTLRNDTEWAPRFGDIDSIVETALRWRESHPHGYGG

SEQ ID NO: 25 - protein, 370 aa, Gluconobacter oxydans
MSPENDQDRNRPDPGDYARAPKQPAGPASGARPQARFDRERLSNDYDDEPPPRRRPAAAGGASGAGRLTSVLGNDPATRKLVGGAVGIGVVLLLAVGGWSLMGSHHGGIPIIGPPPGPVKDRPADPGGMQIMGGDDGDTDMTGNGEAHLAPGPEQPDTKALARQYGVPPGTPAPETPKADAPKADGAAPDNAPAAQTPAIPPEAAAPADTGQMSPGTALPATVPEKPQDQAAAPAEAPKAAPPKEAPKKEEAPVHHAARPAEKPLPAPVPEPENVGPPKAAAPAAETSGGTHEVQLGALDSEAAARKEWDSLRHQAPALFAGHTPLFEKTIRGDHTFVRLRIGGFADLKSARAYCVKLHAQSVACTPAQF

SEQ ID NO: 26 - protein, 336 aa, Gluconobacter oxydans
MKKAVTLNSVAVEAGVSRATASLVLRDSPLVSLETRDRVIGAMDKLGYIYNRGAANLRGQKTGTIGLVLCDIGSPFYSQLMLGVDEVIVDANIVAILVNSAENPDRQLRQIRRLREHGVDGLILCPAAGSSDALLSEIERLHLPCVQVLRHVSQRNGNYVGPDYADGTSLAVTHLVRHGRRKIAFLGGKPVHSAARERLDGFRKTLKKYKLEHDLIIPTQLENLSDLGSFPELLASSTPPDAVVCYNDMLAQSVMGYLLARGKMPGRDFAVIGADDLPQSAVSFPTLTTIVTDPVGVGRNAARLLLDRIDNPATSSTRILVSGQLMIRQSCGGQLS

SEQ ID NO: 27 - protein, 282 aa, Gluconobacter oxydans
MMMAKDDLLREASQALEQAGIEDARREARLLLCWATGRDLGGLLSLDGVEPAQKSRFAEALKRRLEREPLAFITGETGFWTLDLETGRDTLIPRADSEALIEALLDVCPDRNAPLSILDLGTGTGCLLLAALSEYPQATGVGVDLSPQAVALAQRNSVRTGLEKRTAFLAGSWADALNARFDVVLSNPPYIETGDLAGLMPEVLQYEPARALDGGTGGLDAYRILCAALPALLVPGGYAILEMGIGQIDAVSALGVASGLRDVAHKADLGGIERALVLQSDG

SEQ ID NO: 28 - protein, 470 aa, Gluconobacter oxydans
MEHEILIVDDEPDIRFLIEGILNDEGYKTRTAANSDQALELFRAHCPSLAILDIWLQGSRLDGIELLKIFQTEEPGLPTLMISGHGTIETAVSSLKLGAYDFIEKPFQSDRLLVVVRRALEAARLRRENAELRLRAGPETTLSGDGAVISAVRAQIERVAPTNSRVLISGPAGSGKEVAARMIHARSRRAEGPFIALNCATLAPNRFEEELFGLEGEDGQPMRRGVLERAHRGTLLLDEVADMPPETQGKIVRALQDQTFERLGGNTRVKVDIRVIATTNRDLQSEIAAHRFREDLYYRLAVVPLRIPSLRERREDIPGLARHFLERCAQSSGLPVRELSVDALAALQSYEWPGNVRELRNLMERLLIMMPGTGNDPIRADMLPATISQGAPSMTRLNSGADVMSLPLREARDLFETQYLQVQLMRFGGNISRTASFVCMERSALHRKLKQLGVTTNEERNTAPSTPVSG

SEQ ID NO: 29 - protein, 122 aa, Gluconobacter oxydans
MSEAMTDITPSEDTATAPAPGTAPDQEAVIAAIATVYDPEIPVNIYELGLIYAIDLHDDGRVHIEMTLTAPNCPSAQELPEMVRDAVSHVPGVSQATVEIVWDPPWDMSRMSDDARLALNMF

SEQ ID NO: 30 - protein, 240 aa, Gluconobacter oxydans
MIQVPFPPSRAALLLDFDGTLVDIAPTPESVRVPQGLAADLLRLRDMLDGALAIITGRPIAQIDHFLPDIPHAVAGEHGVMMRHAPGQALRERKLPVVPGEWIQAVEKAAADHPGASVEHKKAGMVLHYRRAPEAESVFRELASVWPVENRGFHLQDAQMAIELRPLGIDKGKALRELMAEPPFAGRLPVFAGDDATDRDGVRAARQMGGAGWLIPDDFPDAATFRRWLHDLSEGHGWGA

SEQ ID NO: 31 - protein, 177 aa, Gluconobacter oxydans
MVADTKIAERRAGPGNRKAPSSPVPDDSHIARLCVESGLKMTGQRRVIAHVLSVADDHPDVEELYRRASEIDSRISVATVYRTVRLLEEKGILERRDFGGGRARYEASDSGNHYHLIDVDSGRVIEFEDEEPVRLLAQLAQRLGFDLVSHRIELFGRRAEPDDRKKSPSENRNKSGS

SEQ ID NO: 32 - protein, 279 aa, Gluconobacter oxydans
MIDGHTKLAGVMGWPVEHSRSPLMHNHWCRVNGVNGAYVPLPTRPEGFDQALRGLAAAGFQGVNVTIPHKEAAMLACDELTPTAKRAGAVNTICFVAGRIIGDCTDGTGFCDNLSAHDVEISGRAMVLGAGGAARAVAAALLDRGCEVVIANRTLERAEALVEALGGGEAVAWYEWPSLLSGCSLLVNATSMGMGGKAGLDWDAVLREAAPGLCVTDIVYTPRETPLLLAAQARGLRTVDGLGMLVHQARAGFRAWFGVDPQADQTTFDLLAASLRTDA

SEQ ID NO: 33 - protein, 312 aa, Gluconobacter oxydans
MMKAGPMKKLWRYLPALPALMLSGCTVDLLQPRGPVAEMNRDVMVAEFVIMMLVVVPTCAATLYFAWKYRASNKEAEYLPTWDHSTAIEYVIWGVPAILIALLGAISWWSTHAYDPYRPLQTADNVKPLNVQVVSLDWKWLFIYPDLGIATINQLDVPTNTPLNFQITSDTVMTSFFIPRLGSMIYSMPGEQTQLHLLASESGDYLGEASQFSGRGFSDMKFRTLAMDPAQFNDWVEKVKSGSENLDDTTYPKYAAPQEAAPVQYFAHVQPDLFDGIVAKYNNGMMVDKKTGKVMHMQSASNTAPSDTGMKE

SEQ ID NO: 34 - protein, 111 aa, Gluconobacter oxydans
MTQAPTTTMTGDSHGSYPSYLIGFVLAVILTVASFAAVMSHALSPGMALAALTVLAVVQIVVHLVFFLHMNTSTEQSWNLMCFIFAAASVIVIIGGTIFIMHDTAINMMSR

SEQ ID NO: 35 - protein, 352 aa, Gluconobacter oxydans
MDDMVKTAPRHSTKRHTLRTPSDLIDAGLAPEADRATLEAVGERFTMAIPPAFQDLITHPDDPIARQVIPDARELITLPHEDADPIGDDALSPVPGIVHRYADRALLKPLLVCPLYCRFCFRREHVGPGGGLLSDAQLEAALDWVRQHPDIREIILTGGDPLMLAPRRLKHIVQSLSDIPHIETIRIHSRVPVADPGRMTEELLDAMETDRSMWLVVHANHANELTPQAIKGIRAVLSRAIPVLSQSVLLRGVNDTVESLEALLRAFLKARVKPYYLHHLDAAAGTGHFHVPVAEGQALLRQLRGRVTGLAWPTYVLDIPGGRGKVPIGPEYLDPASPGTVSTPDGEACSFT

SEQ ID NO: 36 - protein, 430 aa, Gluconobacter oxydans
MASRSEILIVGGGVAGLSLATRLGKSMGKSGKARITLIDKSFSHVWKPMLHCFASGTLSNENDKVNFISQASGHHFEFWPGEVASIDRENREVVLSPLLEADGTVILESRRMKYDTIVIAIGSCANDFGTPGVKEHCMSIDNLVEANAFNEKFRMELLRAFGNNSELDIAIVGGGATGVQLAAELHKALEIVGPYNLHAFGKAPPKLHVTLLQSGARILPAFPESVSAAAQQELEHIGVTVRTNARVAAADDHGFTLKDGSYVPAKLRVWAAGVKAPEVTTAYGGLTINRTGQILVNPNLSSIDDEHIFALGDCSFIQDDPLPATAQVARQQAKHLARYLPAWIEHGQKVPSCIFHNKGAIVALGKYNGWAALPGGTVWGGGISHGFSARMAHLMLYRQHQIELFGYYRGLMSFYSDWVETFVRPSVRLD

SEQ ID NO: 37 - protein, 167 aa, Gluconobacter oxydans
MSGCSDPEGIFAPDSAAVRAFRARLDSQPSATAALQARCSTPIRVIRLSVDRPVTEDILTLLQVRETHQVMTRHVRLLCGETVLSDAWNWYVPERLSPAMNTLLEQTDTPFGRVVRQTAFRRQRLETRFPGRASGIVLENRALLLRGADNAPISLVVEDYLPAAIRP

SEQ ID NO: 38 - protein, 312 aa, Gluconobacter oxydans
MPDVLEQRLIGELTTPVDPGVVAFADALARACPVLPLGVLFYGSLLRKADPDGILDFYIITENAAGFAGGLVARTGNLVLPPNVRYSEFRHGGRVLRAKIAVLSRAQFEARTGLGALDTTIWARFCQPVRLVWVRDPQSADVILSLIAGCVTTATCWAALLGDVSMTALEFWQTLFAHTYASELRVEKKGRGNSILEGQEARYAALLTLGWARGRLQFSAHGDRLEPVIDAALRRKAARRWALIQISGRPRNVSRLLKAAFTFENGASYLAWKIQRHTGFDMQLSPFESRHPLVMLPRLLWRARGLLARSKA

SEQ ID NO: 39 - protein, 603 aa, Gluconobacter oxydans
MSGNPNGASPGLTEANQNPTANPVPTPSRSGLERRYGDFPSFAAALDYAAQGESGFNIYSGRGQLLEALPYRLLREQARSMACRLLGLGLVPGDRVAIVAESDGDFARIFFGCQYAGLVPAPLPLPVAFGGREGYVTTLRGMIQSAAARAVVVPDVIGSWTADIVDGLDLVFGGSPADLYRHAEARVELPEISPTALSYLQFSSGSTRFPMGVSVTQAAGMANARAIARDGLHVYPAEDPRDDRCVSWLPLYHDMGLVGFFLTPLTCQLSVDLLPTREFARRPHVWLDLISRNRGTIAYSPSFGYELCARRSGQADLDLSCWRIAGIGGDMIRHHILEGFAERFASNGFRATSFVASYGMAEATLAISFAPLDTGIQTDTIDLRRLEKDGIAEPSNDPSHPLRTFVLCGEALPDHQIEVRDAAGHDLADRQVGTVYVRGPSLMCGYFRRPDETEAVLDADGWLNTGDLGYHLNGQIVVTGRAKDLIIINGRNIWPQDLEWSAESEVPSLRSRDVAVFSVDGDEGEKIVALVQCRATEDESRNQLRDEVTSLFRRQHGVDVDVILVPPRTLPQTSSGKLTRAKAKTMLLSGQFEQQPETTSSVA

SEQ ID NO: 40 - protein, 376 aa, Gluconobacter oxydans
MKVAFPLIGQRHQTLHALPIALEVSARHPDVAVHVSCLTVSHLELARSLATLYPEARVQFDLLPISPKLRRRIELHGLRVVDRLIGLFASRHYFRTFDAIIVPEATSLQLRRMGVGRPKMIWTGHGAGDRAIGFARHLGKFDFLLVPGRKVEQRMLEKSIIRPGAYHRGTYAKFDLVRRMDAKRPKLFNNNRPTILYNPHFLRRLSSWPEMGHQVLQFFATQDRYNLVFAPHFRLFDNHREEGEALRRQYGHLPHMLIDPGSHRSIDMTYTMGADLYLGDVSSQVAEFMIRPRPCLFLNAHHVKWHGNPDYQFWTLGPVTENVSDLGSKIENAFETHPRFLEAQRQYVLETFETLGDEPTAPAAADAIVDFLKRAA

SEQ ID NO: 41 - protein, 473 aa, Gluconobacter oxydans
MSQKIVPVILSGGSGSRLWPVSRSSYPKQFWPLLSKYSLIQETALRGARAGLADPIVICNAEHRFIVAEQLRDVGVENARIVLEPVGRNSAPAIAAAAFLVAETDPDAVLWIMAADAAITDEAALYSALDHAVAAAGQGRIVTFGMKPTRVETGYGYIESGAPLSGLEGVCEVSRFVEKPDAATAEAFFRDGRYLWNSGMFVTQAGVFLSEIQTFEPALYEHVGQAVRTRQSDLDFDRLDDASFRQAPDISVDYAVAERTKRAAVVPGTFGWSDIGSWDALWELTSKDEAGNATFGDVFLDDARNCYVRSDGIVATVAGVEDLIVVVTQDAVMVSHRDRAQDVKHMVSRLKKAGRKEATAHNRMYRPWGFYESLIQADRFQVKRIVVEPGQKLSLQKHFHRAEHWVVVGGTAVVTRDADQIMVRENESVYLPLGCVHRLENPGRIPLTLIEVQSGPYLGEDDIVRIEDVYSRN

SEQ ID NO: 42 - protein, 624 aa, Gluconobacter oxydans
MTVTRSGSPDLNPRRWRRLWYRRDALRSIRMFDTVGARVMTLIVATTLPLAIIASLLAWHSYQQNVGNSAMRTERDTQLAISEITTDLDQTHTLLDMLADGDISSGNALREFALVQTVSQHHYCMLMLTDVSGRPSVVLPPPSTQDAAICSSPELAAPATNSPTARTPVVGVDVLKGDRGPLLKFVVPILSNNSVSGYIIAVRTLGWQRSHLPKGDSRLLLGTDNNSRHFLAMPDGTLYSLFPDRPVTAELPARAFARLKRDISSLSLHDVFTSQGITYAFQNAYGPVSLIVATERTAEESHALNIFLIRVSLIVGLLVLELMAVALGARLFLVDPLEKLALAVADWRKGAAFAPRISHSIPLEIRHLERAFLRATRRLSKHEQDLEQSARNQDMLIREIHHRVKNNLQVVASLLNLQASRIRSHEAREEFRLVRDRVRALATLHRYLYSESGLSALDVQSFLEELCSILLSANGMNAQTRIRLQLDIEHVLISPDQAVPIALIVTEVVSNALRYAFPENRAGHIVINLHKVVSTDAEKEGLVELKLGDDGIGINAGQATESRTRREGIGMQLIRGFARQINADMTVSNENGTWYTLRFIPERPSLTALAMARKAISYGEDSGL

SEQ ID NO: 43 - protein, 233 aa, Gluconobacter oxydans
MAVLNEAENILPVCQELADTFGADPSAEILAIDDGSTDATVKKLLEARQTLLPRLRIISHPKRLGKSAALRTGITAAKGQWIATIDGDGQDDPSAILKMLDQATSASGAAPLVVGVRRKRNDRLSRRIATRFANGLRRRLLNDGCPDTGAPLKLFPRDLFLKIPQFEGVHRFLPALLGHYGAPLICIEVQHRARLHGSSKYTNFNRALVGIRDLLGVMWLQNRTHLPDHLTEH

SEQ ID NO: 44 - protein, 450 aa, Gluconobacter oxydans
MSAPLPSDPATDPSFSDMLETRPSLKMDARDGLMFEGVPLHVIAAAVGTPCWITGAETLRRRAKALRTAFEARNLPVNMHFAMKSQDHQATLTILRQCGYGVDIVSGGEMQRALHAGIQPSGIVFSGVGKSDAELRAAVEHDIAQVNVESVEELYRLDDIARACGRVARAALRVNPDVDADTHDKISTGRAGDKFGIEHRRAVALYGEAASLKNVRLVGLAVHLGSQMLTATPFREGYARLADMVREIRAAGHTVESVDCGGGLGIRYRDEIAPSPDMLAGVIAETLGDLDVRLSIEPGRWLSAPTGILLTRVIETKAGNPDFVVIDAAMNDLARPSLYESWHGIMPVAPSGLTSPTKLWDIVGPVCESSDIFARDRALPAETKRGDLIALLDTGAYGSVMSSTYNTRPLAAQVLIDNGKWEIIRQRQSVAELIAAETVPEWLTAKDDHG

SEQ ID NO: 45 - protein, 421 aa, Gluconobacter oxydans
MPDTIEVTRLDNGLTIITERMDRVETVSFGAYVSIGTRDETADNNGVSHFLEHMAFKGTERRSASRIAEEIENVGGYINAYTARETTAYYVKLLKNDLALGVDIIGDILTHSTFLDAEIERERGVILQEIGQANDTPDDIIFDQFQERAFPEQPMGRPTLGSEERVSTMTRDTLMSYMREHYTTHNITIAAAGNLHHQQVVDLVKEHFRDLPTHQTPRPRAASYEGGELRTPRELDQAHLVMGFPSVSYMHPDHYAVMILSTLLGGGMSSRLFQEIRERRGLVYSVYSFASPFSDSGLFGLYAGTGEEQTAELVPVMIDELKRLQDGLSAEELSRARAQLKSSLLMSLESTGSRCEQLARQIQVHNRPVPTAETVGKIDAVTEDDILRVARTIFSGTPTFTAIGPIDNMPSLEDITARLAA

SEQ ID NO: 46 - protein, 199 aa, Gluconobacter oxydans
MSGRLERKDMTTMFIETEDTPNPATLKFLPGRSVTGDARPVDFGDADVAAGRSELATALFDQPNVRRVFLGGDFVSVTKSDDISWGDLKPVVLGTITTFFESGRPVLSGTQAAPEHDVSPEDAEVVSRIQDLLDTRVRPAVAGDGGDIAFRGYKDGVVYLAMQGACSGCPSSRATLKHGVENMLRHYVPEVASVEQVED

SEQ ID NO: 47 - protein, 626 aa, Gluconobacter oxydans
MTLFPRLLRLWLGTCLRTTRWQVSGSPRALETLTTPAQGTVVAFWHRSLTLSPALWFWARTLEPRLELRVLISRNPDGMLIADVVRPWGIIGIHGSSSKKGKNKGGAAVLRTALKELEAGSIVAITPDGPRGPAELVQPGAVALSRLARCAVVPVGMASTSLRLPSWDGLVFPLPFGRGALIMGEPLFQPDAALLQNALNDVSLRAESVVRHRQSNLADRLWRVAGTLMAPALTVMLRIRLHRGRELPGRLRERMGLERTGPRRGHRPPGQLLWIHAASVGETLCALPLAEALLEALPEMRILFTTATVTGSEIVARHPLYGQRIIHRFIPHDVPRWLRRFLNLWQPEGAIFVESELWPGIIAACSRRDIPVMLVNGRLSDRSARLWTRLGDPARRMMKRLSWVAARGPEDAARFRALGALPVYEDGDLKQDAPPLAYDETEYARLESLIGERPVFVAASTHPGEEELVLQAAERARRLQPDLLTIIVPRHPARGAELAARFDLPRRAAGQDPTPQTQIWLADTLGELGLLYRLADRCFLGNSLAGKGGGHNPFEPLRLGIPTATGPKMENWREAIATVSDTIHIVNDVECLTRWLESPLPPVRTTGLQRSVVSVLRDRILKTVER

SEQ ID NO: 48 - protein, 671 aa, Gluconobacter oxydans
MPEHDGDHASNPPHGVGIPNDSGEIVQTIEQARSEGHTHEIGGEEDGSSHHRPAGMGALLAVLGVVYGDIGTSPLYALQSSVSIVSSPKAPAQPWEIMGLASLTFWALMLIVTIKYVILIMRADHDGEGGIIALMSLAQRVCKSQHFRWLFGLVGIAGTCLFFGDSIITPAISVLSAVEGIETSVPSASHIIIPLAMVVLVALFSVQVLGTGKIGKAFGPIMVCWFSVLAILGIKGIFLYPHILLALSPTFALEFIIMHGYLSFIALGSVVLSVTGAEALYADMGHFGRAPIRKAWLFFVLPSLTLNYFGQAALLIRDPHALSNPFYLLVPHWAQIPMLILATFATVIASQAGISGSFSLCRQLIQLGYLPRTRIMHTNASEEAQIYLPSLNWILAFGALVLVLAFRSSSALAAAYGIAVTGTFLCTCVLAMVVFRRVFKWKSATVGIVFGFFFIVDSIFFSANVLKIPDGGWVPLAIGIISTIIMTTWKRGRSLIAARQQADSMPMGSFLARLPQSRTIRVPGLAVFLTANPDIVPNSLLHNLKHNKVLHDHILFVTVENLDKPEAERGHRAIVQELAPNIHRVIVRYGFMEMPNLPRALLELNALGVAFDAIQASYFTSHELVVRSRVPKMQLWRMWIFLLLLRNAASTTEFLRIPPDRVVEFGVRIAI

SEQ ID NO: 49 - protein, 808 aa, Gluconobacter oxydans
MSTTSRPGLWALITAAAFALCGAILTVGGAWVAAIGGPLYYVILGLALLATAFLSFRRNPAALYLFAVVVFGTVIWELTVVGLDIWALIPRSDIVIILGIWLLLPFVSRQIGGTRTTVLPLAGAVGVAVLALFASLFTDPHDISGELPTQIANASPADPDNVPASEWHAYGRTQAGDRWSPLNQINASNVSNLKVAWHIHTKDMMNSNDPGEATNEATPIEFNNTLYMCSLHQKLFAVDGATGNVKWVYDPKLQINPGFQHLTCRGVSFHETPANATDSDGNPAPTDCAKRIILPVNDGRLVEVDADTGKACSGFGTNGEIDLRVPNQPYTTPGQYEPTSPPVITDKLIIANSAITDNGSVKQASGATQAFDVYTGKRVWVFDASNPDPNQLPDDSHPVFHPNSPNSWIVSSYDRNLNLVYIPMGVGTPDQWGGDRTKDSERFAPGIVALNADTGKLAWFYQTVHHDLWDMDVPSQPSLVDVTQKDGTLVPAIYAPTKTGDIFVLDRRTGKEIVPAPETPVPQGAAPGDHTSPTQPMSQLTLRPKNPLNDSDIWGGTIFDQMFCSIYFHTLRYEGPFTPPSLKGSLIFPGDLGMFEWGGLAVDPQRQVAFANPISLPFVSQLVPRGPGNPLWPEKDAKGTGGETGLQHNYGIPYAVNLHPFLDPVLLPLGIKMPCRTPPWGYVAGIDLKTNKVVWQHRNGTLRDSMYGSSLPIPLPPIKIGVPSLGGPLSTAGNLGFLTASMDYYIRAYNLTTGKVLWQDRLPAGAQATPITYAINGKQYIVTYAGGHNSFPTRMGDDIIAYALPDQK

SEQ ID NO: 50 - protein, 309 aa, Gluconobacter oxydans
MLSIHARQVLAKAVLPILILLAVGLVLLGLVRRPAVDGVRLMATDFMAPAYHGLVWPQERVKVWLTDLRGATDLAKENARLRDENRALRHWYDVAVALAAENGRLKKSLHWIPETVPQYVTGRVTRDDGGPYSRAVLLDVGSGHDVRIGDVALDAAGLLGRVTEVGPHTVRVLMINDDASRIPVTLGSSHGDAIMAGDDTASPRLIFYPQDHHPVEGERVETRGQSTMPAGLPVGTVHYSAPNRPVVVPDADLDRLDIVRVFDYGDDDSQAPDAPGRVRVKKLPQNPLTGPLPFSWLPNLPDMPGRGGQ

SEQ ID NO: 51 - protein, 188 aa, Gluconobacter oxydans
MVAENSTPHLHSAVEPKQTFRRALDMAARAAMPSLFIVFSAILLSAPFGIPGQAQLQFGIAMCTVWFWAYSRPRSMPALAVFLCGLVVEIFSFGPPGTVLLSLLVIYGVAHHWRYGLSRLGFIAGWLIFSVFAALASFFQWALVCLHAVALLSPAPGLFQAALTIGIYPSLTALFVWGRRTFANPDQA

SEQ ID NO: 52 - protein, 239 aa, Gluconobacter oxydans
MTLLTPDQLEAQLRQIGAERYHNRHPFHRKLHDGKLDKAQVQAWALNRYYYQARIPAKDATLLARLPTAELRREWRRRIEDHDGTEPGTGGVARWLMLTDGLGLDRDYVESLEGLLPATRFSVDAYVNFVRDQSILAAIASSLTELFSPTIISERVSGMLRHYDFVSEKTLAYFTPRLTQAPRDSDFALAYVRENARTPEQQKEVLGALEFKCSVLWTMLDALDYAYVEGHIPPGAFVP

SEQ ID NO: 53 - protein, 356 aa, Gluconobacter oxydans
MTLPSPPMSLLAELTHRCPLSCPYCSNPLELERKAAELDTATWTAVLEQAAELGVLQVHFSGGEPMARPDLVELVSVAQKLNLYSNLITSGVLLDEPKLEALDRAGLDHIQLSFQDVTEAGAERIGGLKGAQARKIAAARLIRASGIPMTLNFVVHRENVARIPEMFALARELGAGRVEIAHTQYYGWGLKNRDALLPSRDQLEESTRAVEAERAKGGLSIDYVTPDYHADRPKPCMGGWGQRFVNVTPSGRVLPCHAAEIIPDVAFPNVKDVTLSEIWNLSPLFNMFRGTDWMPEPCRSCERKERDWGGCRCQALALTGNAANTDPVCSLSPFHNLVEKAATGVPEKPELLYRRF

SEQ ID NO: 54 - protein, 487 aa, Gluconobacter oxydans
MSVAADALGGLATTDALFFGRSDSKLTRDDARALVNRGLDGVDDGELFLEYRENESISLDDGTIRSASFNTSSGFGLRAVLGTETAFAHADDISRDALERAVSTVGAVRQGRSGIMAPGPQATNQRLYGDSRPLEGTDFAARAAVLSEIDAYARGLDSRVVQVSAVLSSEWQAVQIMRRADSGGDVADLRPLVRMNVSVVVEKDGQRESGSCGLGGRYELDRLLAPETWRDAVDKALKQALITLEATPAPAGEMDVVLGPGWPGILLHEAVGHGLEGDFNRKGTSSFSGMIGKRVASPGVTVVDDGTLPERRGSLSVDDEGTPTSRTVLIEDGILTGYLQDRLNARLMGTKSTGNGRRESYAHAPMPRMTNTLMLEGSATTDEMIRSMKRGLYAVNFGGGQVDITSGKFVFAASEAYLVEEGKIVRPVKGATLIGNGADAMNQISMIGSDVALDPGIGTCGKAGQGVPVGVGQPTLKISGLTVGGTA

SEQ ID NO: 55 - protein, 443 aa, Gluconobacter oxydans
MTTTPVEALLAAARRHGADHADAILVRDESESALVRKGVPEGIERSESVALGLRVFRGKRAATVSTSVLNEAEFDRLAEQACAMALVVPEDQYAGLAEAALQGRFDAVGLDLECSSAPSMDDLLARAREAEDTALSFEGITNTNGASAGHGRTSVALGTSAGFFGAYSRTGHSTSASVLAGEGATMQRDYAYRSAVHLEDLESPAVIGREAAERVLARINPGRPRTGTYSVIYDPRVSSTLLGHLVGAINGAAIARGTSFLKDSLGKQILSAGLTVHDDPRRIRGAASRPFDAEGCAALPLDLIADGVLQTWLLDSRSGRQLNMPTNGRASRGVASPPSPSVTNLHLAPGTLSSVALRSDISEGILITELMGSSVNMLTGDYSRGASGFMIRNGEIAEPVAELTVAGNLKDMFARMIPGSDLMFRQSVNAPSIRIDGMNIAGL

SEQ ID NO: 56 - protein, 412 aa, Gluconobacter oxydans
MTNTPSPLSSPLANSLRSGPDDRGRFGIFGGRFVAETLMPLLLELDEAYRAAQADPEFRRELDYYLKDYVGRPSPLWFAQHLTEELGGAKVYFKREELNHTGSHKLNNVMGQILVARRMGKTRIVAETGAGQHGVATATVCALFGLKCTIYMGATDVERQKPNVFRMHLLGAEVKPVTAGAGTLKDAMNEAMRDWVANVADTYFLVGTVAGPHPYPEMVRDFQSVIGVEVKEQITQAEGRLPDVIVAAIGGGSNAMGIFHPFLDDASVRLIGVEAAGHGLDSGKTAASISRGRPGVLHGNRTYLLQDKHGQIEEAHSISAGLDYPGIGPEHSWLNDIGRAEYVGVTDEEALEAFQVCTRTEGIIPALECAHGLAHVMKIAPAMAKDQIIVLNVSGRGDKDIFTVAHHLGVKL

SEQ ID NO: 57 - protein, 603 aa, Gluconobacter oxydans
MPFPDTHPALKRALEARGYEQLTPVQEAVLQPGLDERDLLVSAQTGSGKTVAFGLAIAPTLLGDADRLPPSPQPMALVIAPTRELALQVQSELKWLYAETGARIASCIGGTDARSEARELNRGVHIVVGTPGRLCDHLSRGSLDLSALRCVILDEADEMLDMGFRDELEKLLDAAPTERRTLLFSATIAREIASLARRYQKNAERIDTVSGAKQHSDITYRCVITQPQEIERSLVNVLRFYESPTAMVFCNTRMMVNQVQATLLERGFASVAISGEMGQNERSRAIESLRSGQARVCVATDVAARGIDVPALNLVIHASIPTAAETLLHRSGRTGRAGRKGTSVLMVPLNQRRRAERLLQMAKIQAEWEAVPTADAIAEQDKTRLMHDPILTNAVDDMSDELVNQLVETYDATKLAAALVGLYRARLPKVEQIRPMSVEAPRRTERGERAPREEHTMSGEWFKMGVGRTERADPKWLIPLICRLGGVQKREIGSIRIDQEQTYFQIADESVARFKSCLAGAEADEVTIEPSEAPAGGMGPRGRNPGEGKRFGGGGRSGGGFKGGPRGGAGGGYKGRGGSGYGRPKPAAGDGPRGDGSSRKRRS

SEQ ID NO: 58 - protein, 211 aa, Gluconobacter oxydans
MTSPSDFPPPPVPGRLLDVEDVTVFRGDRLVLDGLSLTLDAGDAMILTGPNGAGKSTLLRTISGLRRPDSGEVIRYGDLAWLGHQDALKPGLTLAQNLALAEKLGTNSLPDALEALDLTHLTDLPARLLSSGQKRRAAFARVMLSGAPLWLLDEPTVGLDVASIERLGAVMAAHRAKGGAMIVTTHVPLPLDNTRSHELPSLAHVESFWLS

SEQ ID NO: 59 - protein, 421 aa, Gluconobacter oxydans
MSNKSGDSKNTLYCSFCGKSQHEVRKLIAGPTVFICDECVELCMDIIREEHKTHLVKSRDGVPTPKEICKVLDDYVIGQFEAKRALSVAVHNHYKRLAHAAKSSDIEIAKSNILLIGPTGSGKTLLAQTLARILDVPFTMADATTLTEAGYVGEDVENIILKLLQSADYNVDRAQRGIVYIDEIDKISRKSDNPSITRDVSGEGVQQALLKLMEGTVASVPPQGGRKHPQQEFLQVDTTNMLFICGGAFAGLDKIISARGKGSGIGFGADVRSDDERRLGAILQSVEPEDLLKFGLIPEFIGRLPVIAALNDLDESALIQILSKPKNALIKQYGRLFEMEGVKLTFTEDALAAIAKRAIERKTGARGLRSILENILLGTMFDLPGLEGVEEVVINREVAESKAQPVYVYGKGKSEPAEQSA

SEQ ID NO: 60 - protein, 473 aa, Gluconobacter oxydans
MNTQPHHSSPDSPQDGGWFPISIRLSGARVLLVGGGEIAVNKGRLLLDHGAWIDVLAEKLHPVVQGWVESGRVCHVGERADDEVLRRLLPGCRLVYAATDSRDTNRQVAALADELNIPVCAVDDPGPSSFITPAQVRRGMVRVAVSTEGAAPVLARRLREQIETLLPEGTGRLAAYMQSRRVLVSGRYPNVQDRKRIWEDFLDGPAAEAARSGDESRADARLEALLNGDRKPGEVWLVGAGPGDPDLLTLKALHLMQNADSVLYDNLVSPALLDMVRRDAELVFVGKQRDRHALPQDEINREMVRRAQAGERVLRLKGGDPFIFGRGGEEIEALVAAGVAFRLVPGISAANGCAAYSGIPLTHRDCAQACLFVTGHAKADGVLDLPWDDMADRRQTVVIYMGISTLPQLAAGLLGKGLPADWPVAIVERGTQPGQRVFTGTLATIAQQAAEAQVKSPALVIVGQVVRHRVVSP

SEQ ID NO: 61 - protein, 211 aa, Gluconobacter oxydans
MTRLSLSRRFFVSAAPALAVAGTAAGTARAAGTGSTDARLSPRIIGNPNAKVLVQEWFSLTCTHCAHFATEEFPKIKEQLIDTGKIRYQFHDFCGDRVGLTAAMVARSLPEERYVPFLEALFSSQMQWAFAAGGDPMQRLQQMSALAGVSAAQFDAISKDNVFAEALFDQVKKDSDTYNIQGTPYFRFNNTHYDQDPETYEKFADLVAKAS

SEQ ID NO: 62 - protein, 371 aa, Gluconobacter oxydans
MTASAPSAAPDAPAAAPPNRVLKPIDLGQGVVIEDPVILAPLSGVTDLPFRQLARDLGAGLVVSEMIASWAMIRENENTMRMARMAERGPNAVQLAGCDPEAMAQAAKISVDGGANLIDINFGCPVKKVAIGQMAGSALMRDEVLAGKLLEATARAVNVPVTLKMRMGWDHNSLNAPRLAKIAEESGIRLVTVHGRTRQMFYNGTADWRFVKTVKDAVSLPVIVNGDINTIRDAREALHQSQADGVMIGRGCYGRPWFTAQVAQSLRTGEDVLDPDLATEKEIALRHYRMMLDHFGERPGLRLARKHVSWYSAGLPGSATFRSTINGVESAAEAIALLTAFYDRHIEAGVVRNREAGPTGSLSRDGTREAA

SEQ ID NO: 63 - protein, 429 aa, Gluconobacter oxydans
MKAPDPRPFLPLVLLLSPGWAAAHHASHHHARHTEKPAVAAASEGQKALARAQAARRTLEKRQADEAAVLKAKQIASAQAEAKARQDNARTLAFTAQTHTAQSAVDTTQSRILALKASIAELMDKRTAVEADIRQQNAALQPLLPVAARLSIAPDAALLASPETASESVTALSVLGGFSRLTQQRAQALQSREDELHAIGIDLDSRQKELAELLAQQTRERNAAAARTRIAARQEAVADQGAQKARKAVADAMQAAADLSAEIDALVRQEAQARAELEKEAAALTRQHQLERARHARSQAQALSSSGQGVSSGSGHAPVSGRVAVRWGQTTEAGPATGITYAALSSTPVQAPCTGRVEFAGPFRSFGQMLILDCGRNYRFVLSGLGQLNVSGGQSIRKAATLGQMPAADGMLFVQLRHGTQVVSPAPFL

SEQ ID NO: 64 - protein, 233 aa, Gluconobacter oxydans
MIRLLNVSMMPPGVGQPVLRNLTLTVAQGEFRWLLGPSGAGKSSLLRLLTLETRPSAGQMDLLGMSVSQASRATLRNLRRRIGFVPQDYRLIGEWTVFDNVALPLRLRGASERDTRREAFAVLEWLDVAHLADKRPGTLSGGEQQRAAIARALIGRPEILLADEPTNALEDAQARRLLATFQELVDMGTTVIVATHNEALVREAPAASIVLQDGTLADADTQDGIAARRSDRA

SEQ ID NO: 65 - protein, 442 aa, Gluconobacter oxydans
MQVSRPLTVSASPKGLSGRTRVPGDKSISHRSLMFAALASGRTYVTGLLEGEDVLRTADAMRALGATITREGADWVIEGRGVGALTEPADVLDMGNSGTAARLLSGILSSHGFNSIMTGDASLRSRPMRRVTVPLAANGSEFLTREGGRLPMAVRGTGEAKPIEYRLPVASAQVKSAILLAGLNAHGTTVVEEPVATRDHTENMLRHFGVEVDVSRIDAGGRRIALTGPVRMTARDVTVPGDPSSAAFPIVAALLVPGSDIWIEGVGLNPLRTGLFTTLIEMGASLSIENERVEGGEPVGDLHVRYSQLKGVDVPPERAPSMIDEYPVLAVACAFAEGPSRLRGLEELRVKESDRLASTVALLNVNGAETEVIGDDLIVKGHHGPLGGGTVQTHMDHRLAMSAVVLGLAAQKPVNVDDTAFIETSFPGFVDLMNALGAGLTP

SEQ ID NO: 66 - protein, 326 aa, Gluconobacter oxydans
MSAPQHDLLCIGNAIVDVLAPVGQDLIDGLGAAAGSMTLIDAPTAHAIESRVDIENVTGGGSGANTAVVAARMGAKVAYLGKVTADEAGDHFTRDIREQGITFPSEPLPAADGTPTARCIVLVTPEGQRTMFTYLGACTEFTPEDVHESVVADAAITYLEGYLYDKPHAQEAFEHAARLARKAGRQVALTLSDTFCVERHRAAFHELVAGHVDILFANEAELLALYEVTDFEEAITQVSTETKLAVITRGEKGAVVIGDGERHDVPTTEVKVVDTTGAGDAFAAGFLAGLSKKHDLVTCAKLGNQAAGEIITRYGARPTETFTLTA

SEQ ID NO: 67 - protein, 474 aa, Gluconobacter oxydans
MMRTLFLQPPSFDGFDGGAGSRYQAKREIKSFWYPTWLAQPAALVPGSRLIDAPPAKMGMDPILEDVKNRDLVVMHTSTPSFASDVRVAQMLKDANPRLMIGMVGAKVAVQPMESMEKGGPIDFVARNEFDFTIKEIAEGKPLAEVDGITWRNEKGEIIANKDRAMIEDMDSLPFVTEVYKRDLNINDYFIGYLKHPYISIYTGRGCKSRCTFCLWPQTVGGHRYRTRSPEHVAAEVRLAKQYFPEVQEFMFDDDTFTDDLPRAEAIAREMGKLGVTWSCNAKANVPYETLKVLKENGLRLLLVGYESGNQQILHNIKKGMRVETAKEFTRNCHKLGIKIHGTFIVGLPGETKETIQETIEFAKEINPHTLQVSLAAPYPGTFLHKQATENGWLNEAEAELIDESGVQIAPLHYPHLSHTEIFESVEEFYRKFYFRGSKIASIVNEMVRSPQMMKRRLREGVEFFQFLKDRHAA

SEQ ID NO: 68 - protein, 403 aa, Gluconobacter oxydans
MPLPLTIAAGFCALVSAAGNLQALAGATLLARFRRTERKADDALRLSDRIWPSVTVLKPLHGNEPLLEDALESVFTQDYPDFQIVFGVQDREDTALAVIERLRARHPRIPVSVVIDPQEHGPNRKVGNLMNMYGEVRHDIIVISDSDIHASPNYLRHVVTSLEEQGTGLVTTLYAGRPAAGTLVQQLGACQINHNFLPGVMMSRFLGRQDCLGATMALRRQTLEEIGGLEALVDHVADDAELGQLIRVRGENITIAPTLTHTTVGEHSISDLLAHELRWGRTVKNVAPVGYGLSAIQLPLFWAVTAVLFRPNAWWTWFMLLLTWLVRAIGSRIMDRATECPLPAAIPLLVVRDWLSAAIMVGSARGSRVAWRGRTVHIARRKRNSASCAPSLQAGATHRSVRS

SEQ ID NO: 69 - protein, 87 aa, Gluconobacter oxydans
MDGPWLSSLSRLRKVGKHEGPSSIRLTAYRPIVVFASMSGCIIRIRAVANRAQMDLWMPELVTGNLIQCVMNLISTHGTVYRTKARS

SEQ ID NO: 70 - protein, 162 aa, Gluconobacter oxydans
MPDHQPTGPSAPGTDALSQLGRATTTPQSPEEAVLERVPSPHQGRQYVVRFTAPEFTSLCPVTGQPDFAHIVIDYIPGEWIVESKSLKLFLTSFRNHGAFHEDCSIAIAERLVALLDPQWLRIGAYWYPRGGIPIDVFWQTGEPPKGVWIPAQDVPGYRGRG

SEQ ID NO: 71 - protein, 1210 aa, Gluconobacter oxydans
MMDLVEGTEEASGALMLPPAPAVGRASILCVHLLALAAAEGGGEAALLLRDADGVRVLGGEGSAIAAEGAACLMDGQSLDACTVRLLPVRSGAVEVWLCVRRNAPALEHVLALCALQVDDLLRERAAAPQSGEHELVERMQLRMQRMADTADVAFYRCDFATRVVTGDARFASLWGLPPERLAVGVPIDELLMFLHPDDRLVYDGSLEDELRDEGCYELRFRILVSSPSMPGSGQAQSRSPRSSLLRHVLLRGWREDESRPDSRRSVGLAMDVSSASMTAEALRSSEAFTRLLLSSLPDCIHILDCEGCIRFVNEGGIRSMEMDSPIIMHGLPWVDLWRGQPRRRAALAVQTALAGETARFQGYAMTMRGQRRFWDVAVTPVFGEDGDVRRLLAIGRDLTEANQSAERLQLALEAGAIAGTWMWDDSTSRMTGDARLAQTLGLDPARMREGVMPNVIYDSVDPRDRFAVVQAVTAATRRGGKCRFEFRVDTPEGQRWFEGNGRCDLGDEGRVARFPGIVFDIDRSKRQALRQAALVELGDQLRALDDTSMMEEVAARIICRELDASGAGYGVVNDDWTGMTVGGAPEVTRPLVGMRMFADYGEFRPILGRGEPVAIADVHTDALTAGYDARYDAEGIVAILCVPIFKFGRFVGLMFVCHDAPHIWTDEEIVFTRAVADRTHASMRQARTQQQIRDLNVMLEERILQRTRERDRLWNIARDLFIIIDRRGYYVAVSPSWEETQGYRVDELAGLRLDALCHPDDRRMVLDTFERLLAGTPWPTAGLDVRMRRSDGTWRTYNWNCNDEGDAIYAVGRDLTERNELEEQLRQAQKMEAVGQLTGGLAHDFNNLLAGIGGGLELIGLRLAQGRTDGLGRYIAASQDAVRRAASLTHRLLAFSRRQTLDPTPTDMNALVRGLESLLRGTVGPGIELLFDLQPGLWLTRVDANQLENAILNLCINARDAMHDRGTMLRLESANRVLTADVATDMSIRAGDYVVLTVQDEGCGMPPEIVQRAFDPFFTTKPLGEGTGLGLSMIYGFTQQSGGQVEIHSTPGQGTVVSLWLPRYQGQETIRPEPPLLPVASQPRLLEGQRVLVVDDEEAVRMIVSDMVTDLGGIVLTASDGPSAEALAAEGVPPAVLISDIGMPGGMNGRELGEQMLKRWPGLKVLFITGYAEQSVLGDQALVPGCALLVKPFTVAAFSRKLAVLLKGD

SEQ ID NO: 72 - protein, 179 aa, Gluconobacter oxydans
MVSRTDRHVTQNNTADNTKNVSIETLNARLSDLIDLALITKQAHWNLKGPQFIGVHEMLDGFRSSIDGFSDTVAERAVQLGGTALGTVQDVSKNSACKPYPNNIYRVADHLAALIDRYATVANNMRESIKVTDEAGDDDTADVFTEVSRGLDKHLWFLEAHVQEPTGQMRDGDHKGSRS

SEQ ID NO: 73 - protein, 590 aa, Gluconobacter oxydans
MSFKRRLSALLSSRGKLEYAIHLTETGQAVQGFALLSRLAATGDAEAAFRVGRAYLDGLGVPPSLEDGARWIYQAAEAGHIEAAFVLATLYTVGLPEGFEIRTAGEGLDLSHVPQVGPRHPDFHLGLRWAKIAADAGSPDAQALLGYILTNGPEDLRDLTQARSWYDRSAAAGCSQGHLGVALSILHEAHSDEDLSAAARHLIEATKGGLGTAFDILGRMYESGSGVPRDLGKAASYFHQAAERNIVTAQARYGLMLLEGTGTPRHYGRAETWLKRAAANGDTQSAALLGDLCANGGDLPPNLMEASKWYRLAAEQKHAGAARALGLLYLTGNGVHQDPDVAAHWFRVASEAGDAHADADFGNLILAGASATPDEKQALHARFEKAAEKGDLVGAYNLGVCFAEGVTGTKDGREAARWMQKAADGVVNAQYWYGRMLLEGRGVQPDPTQALYWMEKAANAGMAEAQVTVAGLLVDGSINGRQDHEKALTLYRKAAESGNVDAMFSLAAMYGGGHDVPENRPQAQLWFRKAAQRGNGLAQMMLGRYLVRGLAGVTDPVEGRIWLERAKAQNIRDAEVELALLDEAQPDDDD

SEQ ID NO: 74 - protein, 740 aa, Gluconobacter oxydans
MEHTQSLSGPDGRVSPTVIRLYAVLAAARYHGLELDIRDFAAEPGEDSPSPATLARWLNEQGAVAKGMRLRWRYLVKIRNSPPVVLMFKDGSAGLMVRADAEKSVVWLRDPMGGEGDTPVPVDELRLMQVWTGDVLLVKRRRDESEADAKFDLLWFAKMVLREKKVMRDIAFASLILSILQIFPALIVMQVVDRVVNYHSMATLVSLSGFVIILSFYEILLTYARRELSLILSTRLDARISLHAFNRLLALPLEFYEREQTGEILGRFMAVFKVRDFLTGQLMSTLLDLFTLIVVLPVLFVMSPTLAWMTLAAAGCIGLIVVVFLPPVTRVIGRQVLAEMKRGSILYETVAGIRTVKTLALETTRRELWDERTADVVRWKLAAGRMASWPQTLVMPFEIFINRGIILVGAYLILTNASSMQAGALMGFMMLGGRVASPLVNLAKLMEAFNEVSVSLSEAGMVLNQPTETKALTTGMRPVVKGALSFNHVDFSYPGSTTKALNDVTFDIPAGTMLGLVGRSGSGKSTITRLLQGVSRNYTGYLRLDGVDLREINLTHLRRSFGVVLQDNFLFRGTIRDNITAGRPGLTIDDAIRAARLAGAEEFIERMPAGYDTWIEEGSTNISGGQRQRLAIARAVISDPKLMILDEATSALDPESEALVNANLQRIGKGRTMVIVSHRLSSLVNCHQIAVMDQGKLVDIAPHRILLERCEIYRMLWLQQNRHMTDNDVPGSAGQLTEGE

SEQ ID NO: 75 - protein, 397 aa, Gluconobacter oxydans
MSSENWRTATRLLHEAPNRTEFGETSEALFLTSGFVYDSAEQAAATFTGDVQHFQYSRFGNPTVDTLQERLALLEGAEACVATATGMGAVSSAILSTVKAGDRVVASRAIFGSCYWIVTNLLPRYGIETELVDGTDYDAWERALSRPTAAVLIESPSNPMLDVLDIARVAELTHKAGGLLIVDNVFATPLGQSPLRLGADVIVYSCTKHIDGQGRVLGGAVLGSSKWINETLQPFTRNTGNALSPFNAWVLLKGLETLQLRTDAMARNAAAVADALAELPGIVQVRYPGRADHPQHELAKAQMSNGGSMVAFVVDKDREGAFAFMNAFKVIAISNNLGDARSLATHPATTTHMRVSEEERARLGITDGAIRLSVGLEDPADLIDDLKRGAAAVAALA

SEQ ID NO: 76 - protein, 1088 aa, Gluconobacter oxydans
MAVPDFPRPPRRRFRPFCPGPHFPRHLHIARWAALACVTPIALFAAAGSVFLWELAHGPVDITRVSHLVEPVSIAAGKRPGHPAGRLSWDTLRIQWQPAAGGVPAGLVLMARGLKVTRFDNLIAERADEADAVLSLSALFEGVIAPRTLRLENATLALRRLPDGDVDMDLPNQKRGGRGVPTRLDRLRAIDVHNVSITLAGLPQDRTAVIGPVEMQARRIRVAPHSPDFVWTGTARTMVMLDGLRTTLTAQARQVGNTGRLHLDSTPFEPAELGVFSPLAADWHVPVSVGADAVFVPHGMDEQPSELTLNLTLGDGQVFQKTAEPIHLHAGQASVHLRMDRPGLDGGATVSVPSAGLDVADNAGALTHVHASASLRLDSLRQPRVMDGDAEAGLDGVRFATLGSIWPASIIKGGRRWISRNITDGTGRDLEVRAHLHGDHGPDSILPVSVQGQLTGRGLTVNWLRPVPPATGLDASLHFDGPETLVIDLSRGVQPTGVKENVLLPDGEIRIGDLYAKDQTGDISTHLTGPLAGFMSALAHPRLHLLARHPLPFTHPEGMVDAHVRLTLPLVAHIPDGALHVWTQAMFSGVHLGNVLMGQPVDGASGKMSATEDGLDLTGDGRLAGIPTHVVLHENFQGGAPSRVLQTIEARSVLDPQSTAKARIAPGGLFDGHAVLNAHFVQQANEMSDLKLSLDMAQAALTVPIWAKPMGEPATAMVHIGFQKGRMSVLDGLQAHGTGLSVAGRGVTRAGKLTGIVLEGFRIGRTEGDARIALPQAVDQPIGVTVDADPLDLAPMFAPHPPTAAAPVSQGSSGAKGASMGDNWSISLNAPHVYYGPKAQVGGVVSQIELRNGHLTSGRFALDAPTRVRAVLADTGREHPFVLDIDNLGTLLEGLGLYDRIRGGQTHLDGVFTPDETTVRKVPEGRNTKSAGLWGGLPPFRGHVEMGPSQFLRPPLTLTAVSDLSPLHWLTNHLDRFEISHLATRLSLAGNLLVLHDGVIGNQALGATMEGPIDLTTSTLNLNGTIVPLFGLNALPGRLPVLGHLLSPEKGGGLLAATFDLHGTVEKPDLSVNPLSMLLPGVMRRILH

SEQ ID NO: 77 - protein, 405 aa, Gluconobacter oxydans
MNYDAMFQSALDGLHADGSYRYFADLERRAGNFPKAFHHGLGRDVTVWCSNDYLGMGQHPEVLTAMHKALDETGAGAGGTRNISGTNHYHVELEKELASLHGKESALLFNSGYLSNWVTLGTIAGRLRNCVVLSDELNHASMIEGIRHSRAEKQIFRHNDIEDLERRLKELPADVPKIIAFESVYSMDGDIAPIEAFCDLADKYGAMTYLDEVHAVGMYGDHGAGVAEKLGLSHRLTVIEGTLGKGYGVVGGYIAASAALCDFVRSFGSGFIFSTALPPMIAAGALASVRYLRSSSAEREGQQRAVAYLRQALDKAGIPHVMNPSHIVPVMVGEAELCRSLSDELLNRFGNYIQPINFPTVPRGTERLRITPTPLHTNEMIDELVEALATLWQERQLKTSKSAAA

SEQ ID NO: 78 - protein, 430 aa, Gluconobacter oxydans
MRFSPSVLTRIGRWAAVVLPLALTHVRVAGEADLDLLAVLLLLHSGLTGRRQGGWDWFREPWVVATFCWWGWQMLCTLWVSPGHGALVQSLLAIRFPLAAAALGCWLLKDALWRRRVLWLACACGVYIAFQMLIQAVFGRNLFGIPRFHDGTLTGPYEHPRAAAPLSRLILPLLMVGCAAVEGARSRLVRTLGLCTATVVAVGIMVLAGQRMPLALSLLGIGVCALLYRPMRPAALAAAAMLPVLVLVARVFSPGSFFHLVTLARQQLTHFGQSPYGEIYTHAIVMAQAHPWIGQGYDAYRHFCSDPSTFHGISGLSEAVPERGWLDLCVQHPHNHYLQALVNAGVPGLILFVLMIATWLKAIWPGRNGAAISIGLFAAVFIQEWPIASSSDFLNLPLSGWGFLLLGLALAYRTFRGVDGFQAGRDRPIS

SEQ ID NO: 79 - protein, 327 aa, Gluconobacter oxydans
MPTALITGITGQDGAYLSQLLLGKGYRVVGLLRRSASADVIGERLRWLGILDDVELLDGNMTDLSSLIRIVETVKPDEIYNLAAQSFVAASWQQPLLTGNVTGMGAVNMLEAARIVKSDARFYQASSSEMYGLIQEPVQNEKTPFYPRSPYAAAKLYAHWMTVNYRESFGMHASSGILFNHESPLRGIEFVTRKVTDGVARIKLGLAKELALGNLDATRDWGHARDYVRAMYLMLQQEVPDDYVIATGRTTSIRDLCRIAFSSVGLNYEDHVVTNPAFLRPAEVEVLLGDASKAKKTLAWEPETTLEEMITEMVEADLARHSKRNGL

SEQ ID NO: 80 - protein, 302 aa, Gluconobacter oxydans
MRLLITGLRGFVGQHLQHQVRKRFPGSEIMAGIPDIRDAQAVEKVIAAEKPDHCVHLAAVSTIGAARKSPDHAWDVNLRGTLNVARAMLRHVPHSTFLFASTAEAYGTTFQLGTALTEDAPLAPGNTYAATKAAADLALSAMAREGLRVVRMRPFNHTGPGQSPDFVVPAFASQIARIAKGLQKPEISVGNLDAQRDFLDVRDVCDAYLDVLTAKKPLTPGTILNVCSGETRSIRSILDDLLAISGINAEIVTDPDRLRPSDIPVARGDATLITSTLGWRRQIAWEDTLRNVYEDCMRKTTA

SEQ ID NO: 81 - protein, 491 aa, Gluconobacter oxydans
MTKEYTIWIDVEDIFRYFENNTRPSGIQRLVFEILSVIRHQAAAKPDIGRIVLTRRNTGARAETGPLLSPVSFDALNTLFSTHTEETTPTQAGERSAAHAPSHSLMRRLRHAVIRRIESLPPELARPLLNLAVNQLRALQLLRRYARAKFQRATPSRNTVQAPLSPTAPAATSVDVPKPGDIFLILGAAWSEPDFGERLGRMRRAYGIQPVLLLYDLIPAVRPEWCAISLIRDFRHWLDTTLPQCGRLLAISHATAETVEDYARKQRLKLLAPVQTIPIGSGFGPPHKVGNERPKGLPTKGSYVLFVSTLEARKNHLLAFRIWRRLVTELPRDQVPTLVFAGRVGWLVSDLMQQLENTEWLRGKIRLLRDPSDEELAHLYDGCMFTIFPSLYEGWGLPVTESLVNGRPCIASNTTSIPEAGGPLTRYFNPEDLDDAYRVVRETIEDRAGLKKWQDEVREQFQPVPWERSADAILDACHSAHLTGRMNGQTS

SEQ ID NO: 82 - protein, 456 aa, Gluconobacter oxydans
MTLWIDIDDLLHHLLHHSRPSGIQRVVFEIGSALRNLAGHNVQFVRRGPGATDARDFRTVDWTMVETVFREATNSSIKPGSSSVNAPPLTVQALEEVAPEDTLSAFLRTESRILKGLAGLPRTFARLGLKALQTRLEARRARPELPTFSEGTQLADVARPGDVFLTLGSPWHHASYSQTVRWLRDDLRLSYALLMYDLVPIRCPEWCNRGIITTFRAWHQDILPLADTLFAISHATAKDVRAYLAEQDIGTDIPVHPIPLGTGFGLSDGGMSAEALVREPYVLFVSTIEARKNHALLFRVWRRMLEEMPAERVPTLVFAGREGWLVSDFMQQLENADWLKGKIRFIRNPTDEDLRRLYADCSFTVFPSFFEGWGLPVTESLSMGRPCVVSNTTSIPEAGGPLGRYFSPYSLDEAYTVIRKTIEDPEGLAAWTAKVRAEFRPVPWEDSARAILDRVL

SEQ ID NO: 83 - protein, 392 aa, Gluconobacter oxydans
MTTAPPPGPLSLYIHWPFCLAKCPYCDFNSHVREVIPQQRFAAALRRELEHDAARLTRDGVKRPLRSIFFGGGTPSLMAPETVAALIEDAHRLFDAEDDLEITLEANPTSVEAGKFAAFRQAGVNRVSLGVQSLRDDALHKLGREHSATQAIRALETARTLFPRISFDLIYARPGQSDADWTDELTTALDLVADHLSLYQLTIEPGTKFEAMHRRGELTLPDEDTAARLYDLTGEIAARHGLLPYEVSNYARPGAESRHNLTYWRYADYIGIGPGAHGRLTLDGELYATRRHRAPEPWAERVEKTGSGSTEETLLTPQEKGREALLMGLRLSEGIDEARFAARTDRTLMECVDPALLEACIEENYLERANGILRATGEGRLRLEAILARLVT

SEQ ID NO: 84 - protein, 213 aa, Gluconobacter oxydans
MSYAVKEMFVTLQGEGAQTGRASVFCRFAGCNLWSGREQDRATAACTFCDTDFIGTDGEGGGRFETAEALASTIEACWTDTADDSGRRYVVFTGGEPLLQLDDALIAAVKAHGFEIAVETNGTIVAPAGIDWVCVSPKPGGALVQTEGAELKLVYPQPELSPELFEQLSFRHFWLQPMDGPDRIANTQAAVAYCLHHPRWRLSLQTHKLIGIP

SEQ ID NO: 85 - protein, 237 aa, Gluconobacter oxydans
MAFLVSGQALAAPATSFTPAQRAEIVGIMRDALQNDPSILTDAIRAIREKAEEQKQDSTLAAVKAHQSELQSAPDFAIRGNPHGRITVVEFYDPRCSYCRSMMGEVDSFLSRHPDVRLVEKVVPVLGNNSVLDTRAIFAASAQGKYEAMRRALMADTTKPSMERIVELAQANGIDTKKLTADMSSPQTVALINTNLDQGRAVGLDGTPTFIFGTAAVAPGALEADQMDAFLERARKA

SEQ ID NO: 86 - protein, 225 aa, Gluconobacter oxydans
MKMHAGSGNDMDITRMTPTRLDDEPDAPEPETREDDNKTLNSPISELEGRLFDQRKVLIFGGINDKIARDVTGRLLALAGTSDKPIDVYVNSPGGHVESGDTIHDMIRFVDSIAPINMIGTGWVASAGALIYAAGRPERRVCLPNTRFLLHQPMGGVRGPATDIDIEAREIIKMRERLNRIFAKETGQTYEKVAKDTDRNYWMSANEAIAYGLVNRIVHSATELK

SEQ ID NO: 87 - protein, 133 aa, Gluconobacter oxydans
MGKPATKPAPKPSKQQDDKKSDLQQELVLQRLYDTVQSRRGTDPSLSHSARLMARGRNKIAQKFGEEAVECLIEAVNGNRKELIGESADVLYHLIVMWVDAGVSPEDVWTELKRREGTSGIAEKAARPKEKLG

SEQ ID NO: 88 - protein, 450 aa, Gluconobacter oxydans
MTITCERVVSPLPPEDLDALIEATSAGILDGGGFGWLQPPGHQALARYFEGLLLVPERSFYVVRENGVICGAGQLVRPPASYEAHAATANLTGFFVAPYARGRGLGRALLEAMLKGAKAIGCKVVNCDIRETHVAAIGLFRSFEFEHWGTHPYYARIGGQTVRGLFLSKLLANENEAARWQSSIAMPDTSSAASDTMTDTPTPAHDLTLYPAIDLKDGACVRLRRGEMEDATHYSDDPGAQAKLFAEAGCRHLHVVDLNGAFAGRSTNIPAIESIVKATNLPVQLGGGIRDMAAIERWLEAGVSRVILGSVAVKDPELVRQAARAFPGRIVAGIDARQGRVATEGWAEVSELEANDLALRMEDAGVAAVIFTEITRDGMLAGLDLEQTADMARRLSIPVIASGGVGSLEHLKALRDVARDVPGISGAIVGRALYDGRIALKDALDVLGSC

SEQ ID NO: 89 - protein, 431 aa, Gluconobacter oxydans
MSENRSVTFGLDGLSRQFPLLEGTIGPDVVDMRALSQKTGVFSFDPGLGSTATCTSAISYIDGDKGVLLHRGYPIEDLALNASFTETAYLLLYGELPTAAQYQAFRTDMNTHRLLNEQIRNFFNGFRRDAHPMAILCGTVGALSAFYHDGLDISEPKARDLSARRLIAKVPTIAAWAYKYSIGEPFIYPDEEMSFSENFLHMLFARPGNHYRVNPVLARAMDRILLLHADHEQNASTTTVRLVGSTGANPYACIAAGIAALWGPAHGGANEAALGMLETIGTREGIPAFLNEVKNRDSGVRLMGFGHRVYKNFDPRAKILQATCHEVIEELGLKRDPLLDLAMELERVATEDDYFVSRRLYPNVDFYSGLILKALGIPKSMFTVLFAVARTVGWVSQWKEMIEEPSVRISRPRQLYIGAAERSFVPMSERR

SEQ ID NO: 90 - protein, 228 aa, Gluconobacter oxydans
MTRIREHGIRVVGDVHGDFNAFRHATATDRFVIQLGDLVDHGPDSAGVMELMLELLEQQRGLFILGNHDRKLGRALEGRRLRRDPPLEETLRQISLPEYEGLPERAYRAIDQAPTWLRIGRSLFVHGGFHTAMLSHSPVPGLGEMSAPLSRALFGETTGRMQPDGYPERRLTWINRIPEGMTVYVGHDRRSTDGRPWRRTGRLGGTAVFTDLGAGKGGHLAWIDLNEP

SEQ ID NO: 91 - protein, 318 aa, Gluconobacter oxydans
MSHRDAKTPNGRRGHNRPVLEGKPDFPASRPTTSTTLYSRLRCAGRLSLVLIWAFWACSMQAILVRLPGRLKIMMPRIFWKGVCRILGIRIRVIGHSAGGVRTARDVREGKRPVVFVANHCSWLDIAIIGSTLPVVFVAKGEVGKWPLIGTASRLGRTIFVSRNRRETGRELHDMAARLWDGDDIVLFPEGTSSDGSRVLPFLSSFFAVAKPGRLEQVGMPKAPPVLIQPVSVVYDSLEGLPVGRSRRNVFSWYGDMDLAPHLWSFGQWRSMGASLMLHDPITPDDFRSRKDLSRATFEAVNNGAAELRRGQPKVTGP

SEQ ID NO: 92 - protein, 126 aa, Gluconobacter oxydans
MAPSLTVLLIEDDFLIRTCLAEFLLDSGLTVREADNCAEARAIIGAEPKLDALVADMTLPDGDGMTLVQPARERWPDLPVIYISGHGDLRRDETSGDPARDRFISKPYTLASILEALLDMTSAASD

SEQ ID NO: 93 - protein, 48 aa, Gluconobacter oxydans
MKRLHFSNMDQAVVFFASRTGSLALATQETLSVMCFQSRFQTCIHKER

SEQ ID NO: 94 - protein, 251 aa, Gluconobacter oxydans
MTLPVLVLAGSRDGENDVLAKLGQVSHKALLPVAGQPMLARVLDTIARTPGLGPVTISIENPDCIRDLAGDATILRSAPSPSESVAEAIARIGTPCLVTTADHALLRPEWIQEFLAKAQGCDLAAAVALRATVERDVPGTKRTYIHLSDMSFSGCNLFLIGTPKGRNVIELWKRLQQNRKRPLRMALTLGIGTLLRAVTRTLDPTALYRRIRTLTGANVRLVTLSDGRAAVDVDKPSDLTLAEKILAQTTP

SEQ ID NO: 95 - protein, 271 aa, Gluconobacter oxydans
MSNFKAPWRNMSAIRTGRSFDLGKMNLQQLWFAYLTYPTILLYFALIAVSTWAALHFSTALWATLIPVPVVIVVYPLAWYAIHRFILHGRWLYRNHWTASLWKRIHFDHHQDPHLLDVLFGSPLNTVPTMAIITMPIGGLIAGWSGAFCALSTALVMTCIYEFFHCIQHLAYKPRWKWVADIKQLHVLHHFHDEDGNYGITNYVPDRLFSSFYREARDRPRSKHVFNLGYDIEEAHRYPWVMDLTGSPPRDRPDGARPASARAAADRNRAA

SEQ ID NO: 96 - protein, 384 aa, Gluconobacter oxydans
MKQRAHILDRYLLTQMAPPFAIALLAMLVALLLERLLSLFDYLASAGSSLGTCIALLTDLLPHYFGIALPAALCIAVFLTIRSMSDNNEIDALQAGRVSLMRISRPFMIVGLLLGAASVFLYGYIQPVARYDYRAGFYFAEHTGWAPHLQAGMFASTSSKAVMTADSVSHAGTRLRRVFIREVNANGVAHIITARTGALTISEKTRSTRLDLWNGEIVDDPFQATKPHKPTVTHFEHVVRVIDRPNKETSFRSRGADERELTLFELAHDLRYGLPGIEYRTLRAEMDFRMARAIAIPFIPPLAVALAISARRRKSVWGLIAVAVILIGFDQTLMFGHSLASTGRLPIWLAIWVPEVVFCVGCLAALLRRSRGSWRRRKFTRAPA

SEQ ID NO: 97 - protein, 397 aa, Gluconobacter oxydans
MTDIFAKHHGLREAYEGLTAASPRNPFEVVIERPISASVGIIEGRETLLFGTNNYLGLSQSKKAIGAAVETAETMGVGTTGSRIANGTFGLHRKLEAKLAEFFRRKHCMVFSTGYQANLGTISALVNKDDVLLLDADSHASIYDGAKLSGAQVIRFRHNDPVDLEKRLARLKDHPGAKLIVAEGIYSMTGNVAPLDKFVDIKTRHGAYLMADEAHSFGVLGAHGRGVAEMQGCEDGIDFVVGTFSKSLGTVGGYCVTNHDGVDLMRLCSRPYMFTASLPPEIIAATMAALEDMQARPELRTKLQENAARLHAGLQKVGLKTGEHVSPVVAVTLETVDQAVGFWNALLENGVYVNLSLPPATPDNRPLLRCSVMAAHSPEEIDRAVAVFGEVARHFGL

SEQ ID NO: 98 - protein, 396 aa, Gluconobacter oxydans
MDISASPSIADGPVYTHQTVRLDSGLDLECGVHLAPLEVAYCTYGTLSPARDNAILVCHALTGDQYLAERNPLTGKPGWWSRMVGPGLPIDTDRYFVVCSNVLGGCMGTTGPRSICAETGKAWDSEFPPITMHDIVAAQAKLIDHLGVDRLFAVIGGSMGGMQALTWAADFPDRVFAAMPIATSPFHSAQNIAFNEVSRQAIFADPDWHDGHYRDFGAIPARGLGVARMMAHITYLSEEALSRKFGRRVRHDAATAVPASSSPSLFGEMFEVESYLRHQGSSFVRRFDANSYLTITRAMDYFDLAAEHDGDLANPFRKSQTRFCVVSFSSDWLFPTSQSRLLVRALNRAGANVSFVEIESDRGHDAFLLEEPDFDRTIRGFIAGAAEHAALKVGER

SEQ ID NO: 99 - protein, 448 aa, Gluconobacter oxydans
MSGFPSHLLAGERYAVCGLGRNGTAVVQALLRMGAEVQAWDDRNANLPAQPNLTVAPLTDLSGMTALILSPGIPHLLPKAHPVADLARAQNVQILSDAEILYRAARKSGSKAAFVAVTGTNGKSTTTALIAHLFTTAGRPCAAGGNLGTASLALPLLPDDGVYVIEMSSYMLERLDRFHANAACLLNLTPDHLDRHGDMAGYAAAKAHIFDNMGPDDLAVIGTDDDWCRSIASQVASRGVQVAELDADTLPPYDGPALPGRHNAQNVGAALAIARHLGLDDAVIRTGLRSFPGLEHRLQKVAECDGVSFINDSKATNAEAVSKALAAYDNVMWIAGGVAKAGGIESLAPFFAHIAQAFLIGQDADVLAATLETHGVPFQQCGTLEKAVPAAFEAARNENIPVVLLSPACASFDQFRSFEDRGSHFLQICDNIVKSGHSGTNPMQKQED

SEQ ID NO: 100 - protein, 88 aa, Gluconobacter oxydans
MDAESKSEGAATGGIAADRLRSIIERVERLEEERKALAGDIKDIFSEAKSAGFDVKVIKQIIRLRKQEPAEIEEQETLLDIYRRALGM

SEQ ID NO: 101 - protein, 316 aa, Gluconobacter oxydans
MGKKDEDRRIGERGENQMDWDKLRIFHAVAEAGSFTHAGDRLGLSQSAVSRQISALEDVLRVPLFHRHARGLILTEQGDVLNRTVREVFSKLALTQAFLSESKERAAGKIKITTTTGFGLSWLSPRLNRFLELHPDIEVTLLLEDADLDLGMREADVAIRLHPPTQPDLVQRHLANFPMPIYASAEYLERNGTPHSLEDLANHQIISFAGWHLPLPNVNWLLDLLRQEGVARQGSRRLAINNISAVANAIAAGTGIGSLPLYAATGYPELVRILPNQQVPLVEAYFVYPEELRTSKRIAVFRDFLLSEISNLKGHE

SEQ ID NO: 102 - protein, 108 aa, Gluconobacter oxydans
MSTVTRANLVEHLYSRVGLSRHDSSMILESLLGVISDRLEAGESVKLSGFGTFSVRQKGERIGRNPKTGVEVPILPRAVLVFRPSQLLRDRMNGSENGAADEASSHDR

SEQ ID NO: 103 - protein, 374 aa, Gluconobacter oxydans
MTDFSPPPSPDTITVEASASTGTIQRRARGFLALFFVAIGLYTLKGFLPALLWGCVFAISIWPLYRRAELRFGRSDWLPMVFTLAVALIFLVPVSLVGVKVADEARSALEWIDDVRNNGIPMPEWVPHLPFLSAQATNWWQNHMTSPQRLSHLLHSVDVGHGMQMTKQVGSQLARRGTLFAFSLLTLFFLLKDGDSVIRKCLLGSQRLFGEQGESLAKQMISSVHGTLAGLVLVGLGEGAIMGIVYMATGAPQPLLFAMVTAVAAMIPFLAWPTVGLVALLLLAKSSMIGAIVVLAIGSVVIFIADHFIRPALIGGSTKMPFLWVLLGILGGAETWGLLGLFLGPAIMAALHLLWTLWTEVNPRKGVYAEDKGS

SEQ ID NO: 104 - protein, 333 aa, Gluconobacter oxydans
MRSRLTFSIGATAVLALSSTAMATPLQDPYGTWTVQGENDAISTLKGTSDQYYTSGLRINWTSGTDNLPRPIAKLNHILMGDGVQRISIGLQQIIDTPRDTQADNPPQGDRPYAGLLLGTVNLINDTDLSRTVMGIQFGMLGPSGLGRQVQNGFHKAISDTPSTGWSHQLANQPIFQVQAGRIWRVPVLNVYGIHADVLPAISGAAGDYRTYADVATTFRIGQGLDSDFGNATIGPGLDGTDAFRATRPFAWYFYGGVEGQAVGYDVTLQGSTVRPNAPHVEKVWDVGEIHAGVAVMWHGVRLSYSQNWQTAQFETQKAGLFNYGSLKLSVKF

SEQ ID NO: 105 - protein, 294 aa, Gluconobacter oxydans
MIKPLKKAVLPVAGLGTRFLPATKAMPKEMLPVVDKPLIQYAIDEAREAGIEEFCLVTGRGKDSLIDYFDIAYELEATLKERGKKSALEALAPSSVQAGSLVAVRQQEPLGLGHAIWCARSFIGDDPFAILLPDDIVKGRSCIGQLVEAYNQTGGNVVAVTEVPPEHTNRYGILDVGSDDGKLVEVKGLVEKPAPEDAPSNLSIIGRYVLTPDVMKYLAKLERGAGNEVQLTDAMAKTIGEVPFHGLRYEGTRYDCGDKAGFLEAQIAFSIDREDLGASVKAFLKKYKQYVDAP

SEQ ID NO: 106 - protein, 468 aa, Gluconobacter oxydans
MPFRHDFDPTSLREYDIRGIVGKTLHPADAFAIGRTFASMVIRAGGKRIVVGYDGRLSSPALAEALVRGAVESGAEVTRIGCGPTPMLYFASVADGADGAVMVTGSHNPPDYNGFKMMMGGKPFYGDQIRELGRLSASGDVLPATNGTAARIDISGRYIDRLVQDYDGIRPLRVVWDNGNSAAGAVLSRLVERLPGEHTVLFGEIDGHFPNHHPDPTVEKNLQDLIRVVDEKQADLGIAFDGDADRIGIVDNRGQIFWGDQMLVLLAQDVLSRHPGATIIADVKASQILFDEIAKAGGQPLMWKTGHSLIKTKMAETGSPLAGEMSGHIFFADKWYGFDDALYAAVRVLGIVSRLPGPLSDFRDSLPVTVTTPELRFNCDDKRKFEVITEVAERLRKEGSDVSEIDGVRVNTADGWWLLRASNTQAVLVARAEARDEAGLDRLKAALAAQLEASGLDAPDFSGENAGH

SEQ ID NO: 107 - protein, 427 aa, Gluconobacter oxydans
MSPPSSNRPFSQPSDQPSVGTVLRARREELGWRLEDVAEWLRIRPKLLAALEADDLSKLPGVAYAVGFLRTYAHAMQLDADALVERFRRDTRGAVTRKPELVFPQPEGDRGLPVGVLVGAGLVVVVAAYVGWYRFTEHDNPAQRQVPAVAELMPGAATPAMTSPQVASVMPGRAPTPEPHAPVTASSVPATPAPVPTQNAPAPELPAAPAGAQSTPPSAAPSVAPPASDDDSETTPPAGEAAPTQQTDTQQTGAIGRPATDLPPAVPEGAVVLRALAPVWTQVRDRDGHVLMSRVMQPGESWQGDPAGAPFRMSFGNAGGIVLTTAGATSAPLGKEGQVRRNVEVTADAIRSGAFGSGVALPVQPNAPVSVPGAASAPLAVAPAPVPPRAPSVSVPRKAPTAPEVSADDLNARQLEHQPLEQSSPPH

SEQ ID NO: 108 - protein, 188 aa, Gluconobacter oxydans
MIAIGPAMASQPAWLKAATIIVGTFILEDVATVLSAIAARAGEVSIPLALGALYFGVAVGDMGLYGLGAAGARWPYLKRFLTLPKRERTQDWFSTNVIRVVAISRFVPGARLPLYTACGFFRAPFLPFAMTAVLATLVWTTCLFLLAMRVGGWLLAHQGGWRWAGLAGFVLCIVVVGRLIARLQTVSQ

SEQ ID NO: 109 - protein, 397 aa, Gluconobacter oxydans
MTLPDRTDIPAPHDDLVVRPVTTRADLKLFMTLPRRIYAGMAGFVPAFDMEQDDLLNPKKAPIFRHASIRYFLAWRGNTAVGRIAAIVDHRAIEHWGMKIGCFGALDAVPEGSVVSALLEMARNWLRLQGMQTMRGPVTLSGNGESGLMVEGQDQPLMVAMPWHPRLLGKLVEDAGYKPVEDLLSYKLDLDDQTESRFKVPGDLKIGEGRLGAIAIRRLSKKQIAQQGEILRQLYNDAWSDKFNFVPLQDYEMKAMIKQLGPVLRPEHYVQIDQNGEPVAMALVVPNIYDIAGDLGGAPSPLGWVKLVARLTTHRFHSARVILLGVTQRLRGTVLGALLPSLAIAELMRRRKSLPYSWVELGWIQASDSNMRNLAESIVPEPYKRYRLYERPIDDPA

SEQ ID NO: 110 - protein, 331 aa, Gluconobacter oxydans
MNTAQQLRVGIVGAGHFGRFHALKSAANPAEQLVALYDPDPARAAIVAREARCGIATSYENLLEQVDAVIIAAPAEYHFRLTSQALRAGRHALVEKPIAATLDEAHALADLARETGKVLQVGHLLRYSAEHQAITERIKAPLYIEATRIAPYKPRGTDVSVILDLMIHDLDLVLAIVDSPIAEIDALGAAVSSAHEDIANARVRFENGCVATITASRISLKTERRMRLFSQDGYLSADFMERKLSFIGRERGMPLPGTGGFRREAISWKDHDNLAVEHEAFAASCLHGTPVLVDAQAGIRALDAAIRVTDSIRKSRQIMELSGLIPASDKN

SEQ ID NO: 111 - protein, 75 aa, Gluconobacter oxydans
MKSGIHPDYHEITVIMTDGTEYKTHSCYGEPGATLRLDVDPKSHPAWTGVQRMMDTGGQVAKFNKRFAGIGTRTK

SEQ ID NO: 112 - protein, 194 aa, Gluconobacter oxydans
MTLPLMPKATAVWLIEKTGLTFTQIAEFCGMHPLEVQAIADGEVAAGINGYDPIKNHQLAEAEIKRCEADTNARLKIMPTSSPVKRRAKGARYTPVAKRNDRPDAIAFVLRQFPQLSEAQIVKLLGTTKDTITKVRDRQHWNSANIKPRDPVILGLCTQTDLNAAVTAANDRLAREGHALPVVEAYVPDSDSHA

SEQ ID NO: 113 - protein, 254 aa, Gluconobacter oxydans
MARRRQLYEGKAKVLFEGPEPGTLVQYFKDDATAGNGAKSGIITGKGVLNNRISEYLMLKLHEINIPTHFIRRLNMREQLIREVEIIPLEVVVRNVAAGSLSKRLGIPEGTRLPRTIIEYYYKNDALGDPMVSEEHIAAFNWAAPQDMDDMNQLALRTNDFLMGMFTAVGITLVDFKLEFGRIWEGEEMRILLADEISPDNCRLWDSKTNEKMDKDRFRRDMGRVEEAYQEVAKRLGILPESGNGDLKGPEAVQ

SEQ ID NO: 114 - protein, 363 aa, Gluconobacter oxydans
MTVSADFTSLLHKAALGRHLDSHEAETAFHAIMAGEVDPIQLAAFLTALKLRGETFAELTGAVQAVRHHMTVLPDVPAGAIDVCGTGGDGLKTLNVSTAVAFVLAGLGVPVAKHGNRALSSATGATDVLEVLGIPPTDDLALQGRRLREDGLVFLAAPQHHPAMRHAAPVRKALGFRTLFNLLGPLCNPAQVRHQLIGVFDGRWCEPVARALGALGSLSVWVVHGSTEEGGSDELTLAGPSQVSAWQDDTLFSFGIEPDMAGLAAAPISAIRGGDAQTNAAALLALLDGAGGAYRDTVLLNAAAALHVAGRGDIVKAGAIDVPAFRRNVGMAADSIDRGLARAALEAARMSAHSIAPKDAGRS

SEQ ID NO: 115 - protein, 55 aa, Gluconobacter oxydans
MGKSNVIQIRLVSSAETGYFYVTKKNARSATGKMEVRKYDPVARKHVVFREAKIK

SEQ ID NO: 116 - protein, 380 aa, Gluconobacter oxydans
MLFGTALTSLGAWIYLSLFHGKFWQKGPILAQKPTPVCAPDVAVVVPARDEADSIRECLTSLLEQDYDGKLSVILVDDESADGTGDIARALPDPHHRLTVISGQKRPAGWSGKLWAVHQGEQEALTRIGPYGYILLTDADIMHAPGHLASLVAKAREDDLDLVSEMVALNCESTAERFLVPAFVYFFAMLYPFSRIASEHSRIAGAAGGTILLRRRALERIGGISALRGALIDDCTLAAHVKRSGGRLYLGHSALAWSVRPYRGMKDVWHMIARTAYVQLRYSPVLLIATIIGMATIWLLPVALALFGKGRERRVGLLTYLLSCLTFVPTLRRFGLPLWRAIPLPLVAAFYMAATIGSAFDHHRGVGVRWKNRSYTDETS

SEQ ID NO: 117 - protein, 398 aa, Gluconobacter oxydans
MSKRYVTKTLKKTLPVLLSLLGVALFTFIAAKAGIHPVMEALSKVGVGGFLLLAACQLLIDMGLGVAWHAAVPLLSVRRLMGARLVRDSAGACLPFSQLGGMVIGVRATLAGVDPRTVKGEELHWPEGVAANLVDITTEVLGQIAFVLIALLCLIGHHGASRFVWPLIGGMVLLSLGIAGFIWTQQRGGVMVRKAAAFLGKHIAAEWRDSLIGNTETFQLRLESLWSRPDRISLGAFCHLLCWMGSAAMTWLALQLLGAHVGFFSSVAIEGVVCGIMSAGFLVPGALGVQEAAYVALGMIFGIDAEISLSLSLLRRGRDILIGIPVLLAWQIVEMRRLRHAPPSEASKSTPAPSPASARKTVIPPAVTALAGNIKKEATSRDGKKTEDTPFATAPRVL

SEQ ID NO: 118 - protein, 322 aa, Gluconobacter oxydans
MKVLVTGVAGFIGFHVAHALLKQGMEVVGVDTLNAYYDPALKAARLEQLEPYPGFSFLKVDVASPAAMQDLVARHPDLEGVIHLAAQAGVRHSMVDPYSYVTSNVMGQVALLEACRHLKKLTHVVYASSSSVYGRNQSVPFRETDRVERPSSVYAVTKRAAELMSESYAYLHGIPQTGLRFFTVYGPWGRPDMAYYGFAKAISEGRPVTLYEGKHLSRDFTYIDDIVRGVQRVLGRPPEAGMSRVLNLGGDKPERVTRMIELLEQNLGKKAFVERRPRPVADMESTWASLENVREFCGWKPVVSFEEGMKEFCLWFRKFHGI

SEQ ID NO: 119 - protein, 158 aa, Gluconobacter oxydans
MRVLCCALVAALGMSAGVAKAEDPITQAQARLPTAPLTITTRDGQKHEFTVELAKTYRQQEVGEMFRKHLPENEGMLFMWATPQVSDMWMRNTLVPLDIVFIDSTNHIHAIAENAVPLSEAILRSDGVVANTLELAGGVTAKLGIRVGDAVTSSALKH

SEQ ID NO: 120 - protein, 238 aa, Gluconobacter oxydans
MKHKSCRKTFFSALALSAIAFFSGQAQARHSSGHHGRTVFHSHRSSSHRHSYAHVIQCVAYAKTASEVVLHGNARDWWYNAAGVYARGSAPQAGSVLNFRAIRRMPLGHVAVVRSVEDSRTIYIDQSHWASNGIAHNVRVVDVSPNNDWSAVRVALNDRSGRLGSIYPTYGFIYPHSDNGDRNPAPHVVMARASTVSGFRHRAVLNGSDALSHPMNSTEVAEAPDDAFTSDAPDRSIR

SEQ ID NO: 121 - protein, 490 aa, Gluconobacter oxydans
MTDPDDSALRSVTLPAAWDDEAAQALAQITLNGGPVRLAAEAARWVDTIDACPPLPGTPANTPSPGRSLSYLLLMQQMAPNTALWQCQPDQTPGFTIRLSSFVQEAGFAAEHFVACLRLACDALRRLHAATRIERTGELPLFDLPAQPEDEAAGLILLTDLDACLAALGLDYDSDDARTAACAMAALATTVARAGTKLSPPSIPESPLPGLRTIASSVCATEEGRHFCPIETGFSSPAATEGLLGVETCGLAPAFSPLREDGHLRASTLARLACRGLTPESALALALAGETPLPPVRPQAQAAMHAAVKNVVDFLPAVPEPDLADLQARLARGVRRPLPMRQTGFTQRAAVGGHSLFMRTSEFEDGTLGEISLTPPRESPMARGLMDCLGHAVSIGLQYGAPLEAFVERFAYTRFGPAGTVEGDPSTAYATSMLDYAFRTLSEAYLGEHMPDAPRVEPSSEDPAPMLPFGRGSGESPEWKDRGRRLKLVS

SEQ ID NO: 122 - protein, 550 aa, Gluconobacter oxydans
MTLNLRHYALLGLLAFLLALPGRMTLPPLDRDEPRYMEASEQMLLSHNFIDVRFQDKPRYLQPAGIYWLEAASTAAAEKIFGPSVLRKTWPYRIPSLLAATIIVPLTAWIGATLFGGATGLMAAGLLMVSTLFVAESHMATIDTVLLLDILCIEAALLCALTDRQKSRPTHLRVAVAYWLALGVGLMLKGPVVLIPGFGTPLALWFLEKDRSWWPRLRPRWGWMLMIAVVVPWCVAIEVISGGDFFARAVGRNFLGKVTHGQEAHGLPPGFHLLVFGLAFWPGSLFAALAIPSVWKNRKLPQVRFLLSWIVPHWLVFELIATKLPHYVLPTYPAIAILTAASLMAWRPLTLSRWAKALLGVYGVLWAVIGIAFCLAGSIALYKLEHTFSLSALIALGGSLPLMLGAIMMLLKQQRRQAAFCAMGAAVIAHAGLFLSVIPNLQTIRLSPRIADLFEDVRPCNDSVLISSSYSEPSLVFLVGPNTQLIGPEAAAAYLHDHPQCSLALIDIKDKNIFMSTLKKFGINVVEYNKIEGLNYSNGHHLNLELFAPL

SEQ ID NO: 123 - protein, 159 aa, Gluconobacter oxydans
MNALAQLGMVSELPRDIQNGAAHLVEEERKDYFIERDGERYAGNHLLIDFWDARNLDDPMRIDETLCEAAVAAGATILHSHFHHFTPNGGVSGVIVLAESHISIHTWPERNYAAVDVFMCGACDPNLSIPVMQRLFQAGRIEVDAVRRGRVQDKAVKAA

SEQ ID NO: 124 - protein, 332 aa, Gluconobacter oxydans
MNAPKTTEAKTAIIVAGPTCSGKSALALDLARTFGGTVINADSMQVYRDLRILTARPDAADEAAVPHRLYGVLDAAVPGSVAWWRAEALREMDAAWAEGRMPVLCGGTGMYLRALTDGLVEVPDPGDAARTEARGLAEEIGPEGLHARLMQVDPETASGLRPNDTQRISRAWEVWTGTGRGLAWWRSQPGLPPAPCRFVSVRLDPERDGLRRAIDSRFAQMLDAGAIEEVSHLLERGLDPVLPAMRAHGVPELASVLRGDVTLEEARKSAVLAIGRYTRRQATWFRHHALGEAEDSMVSLRRYTHSAQESESHYEKIENFISERVDAAALSS

SEQ ID NO: 125 - protein, 213 aa, Gluconobacter oxydans
MLVHYGYGVVGIIVMFESMGLPLPAESVIIAASLYAGSTHHLEIRWIALAAVLGAIMGDNIGYLIGHHFGYGILKKHGYKVGMTEERLMLGRYLFRKHGGIVVFLGRFIAVLRVFVALLAGANRMPWHSFLFFNAMGGICWAGGYAFVTYELGKQIEKISGPVGVVMAILGVSCLIGALVFLKKNEKRLTEEALREAEADEKRDEARADTKPS

SEQ ID NO: 126 - protein, 430 aa, Gluconobacter oxydans
MKRLDTSAAGFSEDFAKLLAARGSDERSVAEPVRAILADVRSRGDEALCDYTARFDRLTLPAEKLRISTEEIASEAARVPADLMDALRTAARRIETFHAAQMPKDLDFTDEDGIRLGMRWTPLDAVGLYVPGGKAAYPSSVLMNALPARVAGVKRLAMCVPSPGGVLNPLVLAAAQLCGVEEIYRIGGAQAVGAMAFGTDLIALVDRIVGPGNAYVAEAKRQVFGHVGIDSIAGPSEVVVVADGQNDPRLVALDLLAQAEHDEQAQAILITTDAAFADRAAEAVRKELETLPRTTIASKSWDDHGAIIVVRSLEEAAEIVNALAPEHLEVMLDAPRDFSAMIRHAGAIFMGRYCPEAVGDYVGGPNHVLPTSRTARFASGLSVFDFIKRTTTIETDEAGLRRIGPAGVALATAEGLDAHALSLSVRLEKN

SEQ ID NO: 127 - protein, 573 aa, Gluconobacter oxydans
MPRHHSYRNRSLLALMVLEICVPRMAVAASPASAATPVTQAPLIQASVTQAPVTQTEEWIHVPSTERPPIQNYPHAGVVAQPRRVVASQNHAPQGRQGQWGAFSYGNGESAGFGPVGRYGVAPWAEDWSFLRDKSRRDDPFDPLKFIALNDAKTIWLSFSGETRLRNWYEETPFLGKKGGSNSGRFGVRNLYGADLHLGEHVRLFGQLINADAAGWKGFGYNTTYRKRLDLQQAFIEFKGKLAGAQTGFMFGRQQFLDAPSYVLYNRETPNVPLSWNGGRIYAIWPNIRVDAFDFVQTKTDATLMFHDTEDYGTRLYGGDITALVPQFSIGGETVHSFLDVFYYGYRYGGSLSVVPLASGSLKGTSSRGNVGFRWYGTAASFEYSFGGLYQDGTFQKSGSEHKSGVQAYSINTIVGYRHTPSPLHPFIGVQADLYSGGANGTNGPVRTYMAPFNPQTNYLDTTTYIQPSNLVSLSPVLSVTPWKGFASIQFKVPFMWRENADGAIWNSSGPYTFSKTYHGGYIGVVPQASLKLQLNRHLTWQIYGARFMASNGLHAAGGKSGSYAQSNVVFRF

SEQ ID NO: 128 - protein, 455 aa, Gluconobacter oxydans
MRQPLPARLALIALLGCGLAALPDSARAEPAIMPPPPPAPPAPPSLQAPLTASGTLVIPATCLDRLSIVGGENAHIVSGSGSLEKHGDRLTFTTSPQDCATQDSAVVMVPALTSIDIQLPHSRLTTYRITGVNGDVTAISGRGNIDIDQASGLTLTMQSTGNVSVGHVTGRLSVQNLSSGDLHIGDLAASSASITAMSSGDIRVEQGTVDVLTVRDYGSSTITLNAEARDADITLLGSGDITLRKVSEALKKRPIGSGTLSIGDATSSRITSVNTPDGAAILSDATRKILDRLDIQLDSPDHVSRTTDHNRHHSGGYGVIGVLLKIALIVWAVRLFRRYRRTGVLPFRKTLDKAAAGYAEGVQSWSRHRAAWRDTPGASATAVVRDTMAGFRRQQPDPAEDFSRSVAPGHPLARLQDRLVRMERRLGLMEQFVTSPDFSLERQFRDLERADGRRA

SEQ ID NO: 129 - protein, 285 aa, Gluconobacter oxydans
MLFLRRLSCRVALLCVGMGLSVPAVRAQGVLEAPPHCSGLALQAEFACRSWTEVAQDVKAGTDTVIIPVGGTEQSGPYMAVGKHNVRAQVLADAIAVQAGHTLVAPVVAYVPEGSTSPRTSHMKFPGTISIPPAVFEGLLKGAAESFRVQGFRRIVLLGDHGGYQSFMAQVAQELNRAWKGQAAVLYLRDYYEVVPHQYAEALRAQGHAAEVGLHAELSDTSLMLAVDPSLVRQDALRAAPKPGVAEGVYGGDPRRASAGLGRIGTEMQIRTAVAAIQSFQRSHP

SEQ ID NO: 130 - protein, 406 aa, Gluconobacter oxydans
MTFKTPLLVAMTLLGAAAAHAQEYSPSAPMVPVPADASAPVAAPVAPSGIQTIPGMPPVIDPKNIYSETTPSHISPAIAHDPARVYVPNLRGDSVSVIDPASFQVVDTFRVGHSPQHVVPSWDLRMLWVTNNSEGRPDGSLTPINPATAKPGPSIAVDDPYNMYFTPDGKYAITVAEAHKRLDFRDPHTMELKGSVETPECKGVNHADFSIDGKYAIFTCEFGGYVAKVDTVNLKMIGMLKLSKGGMPQDILTAPDGHKFYVADMMADGVFVVDGDSFTETGFIPTGIGTHGLYPSRDGKLMYVANRGSHRIHGPKHGPGGVSIIDFATDKVIKTWMIPGGGSPDMGNVSADGKLLWLSGRFDDVVYAIDTDTGAMRKIPVGAEPHGLTVWPQPGRYSVGHTGILR

SEQ ID NO: 131 - protein, 110 aa, Gluconobacter oxydans
MSSLSTHVLDTVSGKPAAGVSLRLLQGDRVLFEGQTNTDGRCPELRDVAVSKGIYCLEFQIGDYFRKGGQVLSDPPFLDVVPIVFGLAAEAHAHVPLLAAPFGYSTYRGS

SEQ ID NO: 132 - protein, 200 aa, Gluconobacter oxydans
MSDIPLIDLKADPFALFAAWMSDAEKSEPNDPNAMAVATATPDGRPSVRMLLLKGVDERGFVFYTNLESRKGRELLSNPHVALLFHWKSLRRQIRIEGPVEAVSTTEADAYFASRSRMSRLGAIASDQSRPLDDRSTFEERLKAVDGKYGDGPIPRPANWSGFRVLPEAIEFWQDRPYRLHDRAVWTRDGNGWNVTRLYP

SEQ ID NO: 133 - protein, 294 aa, Gluconobacter oxydans
MLIDIKNILLPLNGSGDLEAVMSVALDFARRFDAHLSAVVVGSDPSEVATLAGEGISAGMVNEMIDTATTEAQRRAISIRKAFDAFIHEHGIRRVEPSKIGSSAGDGVSASLDVLNGTEHDSLTWRSRLADMTLVPNLAKDGDPRASETLHAILFDSGRPLVIAPPAPPKTVGKRIAIAWNGTPEASLALRCILPWAHKAEGVQVLTCQDYQRRGPGADEVVTYLRMHGISATSREFEAVNRDIGAGLLKAATEFNADMLGMGAYSHSRLRQMILGGVTRHILEQAQLTVLMSR

SEQ ID NO: 134 - protein, 776 aa, Gluconobacter oxydans
MRSVFLCVPEDPIVTTEDSRPAPRRRSPRKPRNAVTPAQNRGRRRQTAAARAEDYAHMLTSPERFLNRELSWLDFNQRVIDEAENPRNPLLERVRFLSISSSNLDEFYSVRVAGLVGQVREGTVVRSPDGLTPAQQLVQVRQKARHLLAEQQRVWHLLEGELKEAGIVILPTDSLDETDLAQLSTLFDERVFPVLTPMAVDPSHPLPFIPNMGLALHMRLKDAASSAHVMDGLILLPAQVPRFLRLPARLKEGQETPDQIRFVLLEDLITLFAGRLFPGLVIGAAGVLRVIRDTDVEFEDEAEDLVRSYETALKQRRRGVCIHLALDRKLPDTLGREMGEELGVGEEDVVVLPSFVGVTDLKQLIVDDRPDLVFPPYTPRFPERVLDYDGDCFAAIRAKDMLVHHPFESFDVVVQFLRQAALDPNVLAIKQTLYRTSRDSPIVHALIEAAEAGKSVTAMVELRARFDEEANIRLSRALEAAGVQVVFGFAHLKTHAKLSLVVRRENGSLRSYAHFGTGNYHPITARIYTDLSFFTCDPKLASDSARLFNYMTGYAIPAKMDALAFSPITIRSTLEQLIQDEIDHAKAGRPGRIWLKMNSLVDAELIDRLYKASQAGVKIIGIIRGICCLRPGVPGLSDNIEIKSIVGRFLEHARVFAFGNGHRMPSHKAKVFISSADWMVRNMDWRVEAMVPITNPTVHAQILGQIMTMNIKDNLQSWTLTRDGYWHRVSPGAHPFSAHEYFMNNPSLSGRGSAAREKVLPEAHRPRERPDRILED

SEQ ID NO: 135 - protein, 641 aa, Gluconobacter oxydans
MPARRIALNVVLDGVVSAAAAPVARWLADPAGGWLHPLWFIAGGGITLLVGGLPFRIPQQYWRFSGVADLFNIACASVLSALLFAELLHVAGYPLPTPTFPIIHALVLLVFLGAIRMMWRLAARRRSLALDGERILLLGADHEADLFIRAMERDSGNNRRVVGLLTGGAQQAGRRIHDCPILGTISETPAILERLFAAGKLPDALVITAGEIKGRELAQILEAARVYDIDVQRTPSLTALQPADRVELRPIAIEDLLNRPPVALDSQGMARLICGRVIAVTGAGGSIGSELARQIASFQPAMLLLIESSEYALWQINLDISERFADVKRQQIIADVRDRRRIAEVFGMYRPHLVFHAAALKHVPIVEDNPVEGVLTNVIGTRIVADEAERAGAQAMVMISTDKAVNPSSLMGASKRCAEVYGQALDMRARAGQGGMRCVTVRFGNVLGSTGSVVPLFRRQLEHGGPLTVTHPDMTRYFMTVPEAVGLVLQAAVRGTHERAQNDATDLRLRQGGIFVLDMGDPVRIMDLAFQMIRLAGLRPETDIEIRFTGLRPGEKLFEELFHGREAPVPTDAPGLRMASPRTVDFKVAAAAMDELETACHASDLGAIMSILYRLVPEFLHNRDGGMPVAMSHPDPEMIAP

SEQ ID NO: 136 - protein, 710 aa, Gluconobacter oxydans
MGMPGDNRPQDVQVSSVMEEERLSVDVGAAGGTCVETGQRKRRWQVFMSRAPALVGLVLLVAAVVVIWRELQHLSLHDITASLSAIPDSALLAGGAATVLSYFILSFYDRLACLHVRAKVSYQRSAFAAFCSYVLSHNLGCAAISGAAVRFRLYRSWGVAPGAIAQIIAFCSATYLLGTMALIGGILIIEPHAVPVLSHLPEFLLRLAGLALWGVLLAYVLVARVRRHVRIWKYEIELPGPGIAIAQIAVSAADMAATALIAYCVLPPLPPEAHFGFGTFLAIYLASYTAGLMASVPGGLGVFDGAMLLALQAYLPASQIMGAILVFRLFYYIIPLLLAGLMFAGHELFLRGEQALVSAGQTPRRVRPSQVIRESEADFSVAVATSVQAVVGILLVLYALVADLPPLQTSLGAAVSQIADLLLTVAGVGLVALSWGLSQRVALAWKFSLGMLGSAALLLMLRHAPWEGPVVIVLVMLLLLPFRNCYYRRAHLLAAPLTPSMLAPLSLWGLGLLGVGWVAVQRHLGPIWWRSMIYDAHTAVGRWFLGFSALCGFYVLWRGMRRTRIRFEAWTAENAHRYHSLAHALPQLGARRPTGLLLDEAGRAAIPFLRTGQFIIGLGDPAGSERNCVAAIWRLRDLALQEGCKLAFIQVGQSLMAVYNDLGLTVCPDRTAGTVCCFSEDYRMLRAFLKGEERLARKRQPQTASGLTGS

SEQ ID NO: 137 - protein, 324 aa, Gluconobacter oxydans
MTTRPHIAVIGAGAWGTALACATAATGADVTLWMRNPVPPGTRTLPRLPDITLPDNVTITGDFPRTADIALLVTPVQTARDVSTRLQTVLDPAVPVVTCCKGLEQATSLLPLDVLAETMPGRPTGVLSGPNFAIEVAKGLPAAATLACTDLALAQKLTALLNTSSFRLYASDDAAGVQLAGAAKNVIAIGAGITIGAGLGENARAALITRAVAEIGRLAEATGGRASTLAGLAGMGDLILTCTGRGSRNYSVGLELGEGRPLTDILASRTTVAEGVLTAPAMLALARQHNVRVPIIETVTRLLNDGVSIEEARHLLLDRPPTRE

SEQ ID NO: 138 - protein, 170 aa, Gluconobacter oxydans
MSGRLFTSPMFLGFDHLEQMLERAAKSTSDGYPPYNIEQLSSTALRITLAVAGFVMDDLQITQEDNQLVIRGRQADDSQGRIFLHRGIAARQFHKAFVLAEGIEIGGAWLDNGLLHIDLLRPEPEVRVKRIAISQGRRSTAPGPAVHHEVVPPVVKARRTTRPARDIDDE

SEQ ID NO: 139 - protein, 275 aa, Gluconobacter oxydans
MSDTQAAEPIAEPAIEPTGLNRWALRIEYDGTGYLGWQKQNDGTSIQGLIEAAASKLVRNRPVPSITAGRTDAGVHAAGMVIHLDFPDDAPIDARQIRDGMGYHLKPHRVVVLETAKVGPEWNARFSATWRSYRYTILNRPARPGLMENRVWHIKRPLDVDLMQQAANHLLGPHDFTSFRAVACQARSPIRTLDVLNIHRDGELVVIDTKARSFLHHQVRNMAGTLMMIGSRQWPVEKIIEILEAKDRCAAGQTAPPEGLCLMDVGYPDDPFNRF

SEQ ID NO: 140 - protein, 352 aa, Gluconobacter oxydans
MSDMTASESRPGDSRFFQRSGPFGLERLAEVSGSEIIPAASGKGLSEFRGVAPLHVAGPDEISFLDNRRYLPLLAETKAGAVILSPAFTDKLPPDTAGLACKAPYLAWARVATLFHPAPASTGVRHPSAWIAEDAEIGENVEIGPFAVIGSGVRIGRDSIVASHVSIGQSVEIGERCRIGAHAAISHARIGDRVTLYPGVRIGQDGFGFAVGPEGFETVPQLGLVVLEDGVEVGANSTIDRGSMRDTLIGAGTRIDNLVQIGHNARLGRCCIVVSQAGISGSTELGDFVTIAAQAGLIGHIKIGSKARIGAQCGVMSDVDAGADVIGSPAMPFREFFRNVATLRKLSRKSGD

SEQ ID NO: 141 - protein, 304 aa, Gluconobacter oxydans
MTLNSLMRTVSAGALLAATILVSAPGAHAQASGGNGGWFVPKAAHPDAPPPRPVQRRVPEAAPDEEEDSAPAEQQQAPPILPLPPIPAPPSIAKASPPPAAVIGVINVQAVMQISSAWQEIQQVLGARRDRLAQAVQREEAAWRGEQQKLQAQARSLTSDQIQLRERHLQERRAKDQHDFGNQARIIQEAAQVAMHQIERELEEPNGIIAAVAAAHNMNLILHAEQVVLHVGGQDITEEVGTQLNKTLPHVFIPDDGVDPEQLARSGKMPTTADEQRQAQGPQAPGQQQAPASAPSESVLRQHH

SEQ ID NO: 142 - protein, 202 aa, Gluconobacter oxydans
MLLRQNERTALFIDGASLHHAARNLGFEVDFRSLRNLFESQCLFQRAFYYAAMPETDDYSPLRPLTDWLAYNGYHLVLKNAREFTDHSGRRRIKGNMDVELTVDLLEQAGRLDHAVIVSGDSDLRRAVEAVQARGVRVTVISSMRSTPPMIGDDLRRQADLFVELADIAPSFTRRQAEPRNPSRQGPVRHPADINSDETSDS

SEQ ID NO: 143 - protein, 222 aa, Gluconobacter oxydans
MRILHHLPLSPQCRLVRLALSEKRLPFEPVIERVWEQREEFLHLNPAGEVPVLVEENGLAVPGGRVICEYLEDAYPDTPLLGRTFADRVETRRLVDWFDTRFAQEVTRNLLGEKVDKRQFGRGHPDGNALRAGYANMRFHLDYIGWLAETRSWLAGPALSLADFAAAAHLSALDFIGDVNWSKAPAAKDWYARVKSRPCFRGLLSDKVSGITPPAHYANLDF

SEQ ID NO: 144 - protein, 1055 aa, Gluconobacter oxydans
MNAIVVTALKRPYTFVVLSIMILIFGVRAIVSTPTDVFPSIKIPIVAVIWSYTGLMPDDMSGRIVYYYERALTATVSNIEHIESSSYYGRGIVKIFFQPGTNTAVAQTQITSVSQTVIKQLPNGATPPLILAMDASSVPVLTLQVNNPTMSGSEIYNMASNLIRPELISVPGAAIPNPYGGLAPDIMVDIDPIKLLAHRLSPEDVAAALNLQNIVLPAGDQRIGQLDWMVKTNSTPLDLAVFNKMPVKQVGNSVIYLRDVAWVHRGGPPQINAVLVKGQQAVLIVILKSGDASTLSVVSGIKKLLPQVQATLPAGTTVSILTDASSFVKESVVDVVREMITAAILTSLTVMLFLGSWRSTVIVATSIPLAMLCSIIGLSIAGQSINVMTLGGLALAVGILVDDATVMIENIDAHLETGKELEDAIIDAANQIVIPTFVSTTCICIVWLPLFELTGISGWLFMPMAEAIIFAMIASFILSRTLVPTMANWMLAAQVRMHRDPEWHNRKLSIFGRFQRGFEARFTSFREHYKTILETLISIRGRFVTLFLLAAVSSMALLLFIGQDFFPEIKSGTLQMHMRAPIGSRLEETGKIAGLAERRIRSLLPGQVVNVVNNCGLPFSQLNQAMIPSPTVGSQDCDITIQLRNSESPIAEYRRTLRKGLTNDFPGTIFTFQPGDLTAKILNFGLPSPIDVQVVGRDLSDNFRFATQLAKKLRHIPGITDVSIQEPMTQPTIMVNNRRSFALGTGITERDVALNALVTLSGSGQVGQTYYLNAQGTSQLIDVQAPANYLQTMNDLEILPIDKGDGNPTNQTPQLLGGLSALVQTGTPSEIAHYNIMPVFDIYAAPEDMDLGTVSRAVNRIVNHERKLLPHGSSMVVRGQAVTMNDAYVQLIGGLALSIVLVYLIIVVNFQSWLDPFVIITALPGALGGISWSLFLTHTAMSVPALTGAIMCMGTATANAILVVSFARERMDHHGDAITAALEAGYERIRPVLMTALAMMIGMIPMSVSNSDNAPLGKAVIGGLLVATVATLLFVPCVFALIHYKRPAGPEGDRA

SEQ ID NO: 145 - protein, 430 aa, Gluconobacter oxydans
MSHSADQGQVPPTNHPARTGSGTRGKLVLLVVILLAIALAAWGIVQRGAHYHSLTGATEDAAIPPVTLIAPQPGPKTRQVDLPANLAAWYEAPIYAQVSGYVKMWYKDYGAHVKRGDVLAEISTPSIDAQFEAAKAHYNVILARYNLALITTKRWTALKGTQAVSRQEVDVQAANAAAQKAELEAARHDVDRFQALEDFKKIVAPFDGIVTSRLVNVGDYVNAGGGNLNSRGTASELFSVADVHRMRVFVSVPQDFASVISPKIEAELTVPQYPGSHFRATFLATANAFNAATRTVTTELTLDNSDNLLWPNSYATAHISAPGNPNILILPEGAIIFRAEGTQVAKVINNHAHLVNVTVGINFGTTVQVLSGITKDDRVVANPTADLLEGDEVKIVPTTPGYNTPSKAQQDADQQPVRQHDANPEEAGSR

SEQ ID NO: 146 - protein, 549 aa, Gluconobacter oxydans
MKPECSQSSPLQSSPSATASSRRNRSRWRITTALAGVFSIGLASCDLSPEYHPQKFLYPEGWEGKGLMVNAQPADGVVRSDWWTMFNDPILDGLEKRMLAVNPDLQAAAEAFTQARDVARETESRLYPQVTGAAHMSDNKGSIGRLYNNPATSSSLVYESNQAYSGAATWEPDFWNSIRNTTRMQKNLAQASAGQYALARLSLEAELASDYIALRGLDAQNAVYDDSIRYFRAAVEITELRQAGSIGAGLDVSRAETQLYSAQAGKSNLIARRNVMEHAIAVLLNTAPAGFHIAPVKDVKMHFGVVKINAGLPASLLERRPDIAIAERQMAASARAIGVSRAAFYPHITFSAEGGFEDGGFDLASISRAFWKIAVQAVEPAFTGGLRRAALQRSWSQYRSMVDNYRSVVLSAFQDVEDGLTQTRQFKIAQDQQQKAVDAALRTQSMTMALYTGGLSNYLDALVAQQDALQARLAEVEVQTAQVQSSVRLVRALGGGWSASDLPGIKQIDPFGPLQYKDLRTPKPVNGIDSHASPLDNDLRGDRVSENVP

SEQ ID NO: 147 - protein, 1439 aa, Gluconobacter oxydans
MNELMKILGQTGQSVTFDQIKIQLASSEQVRSWSYGEIKKPETINYRTFKPERDGLFCARIFGPIKDYECLCGKYKRMKFRGIVCEKCGVEVTLAKVRRERMGHIELASPVAHIWFLKSLPSRIATMLDLPLKDVEPVLYFEKFLVLDKGVCESDQIDSYKNGKKRDQYLLDEIRCEDLLDEYPDAGIDVGIGAEAIKRALSSYDWGIPNDQERDLSLAAKEKGLPDPFDYDADVMEGDSEKTMMRKKLRKATSEAARKKLVKRLKLVEAFVESGSRPDWMIMDIVPVIPPELRPLVPLDGGRFATSDLNDLYRRVINRNNRLKRLIELRAPDIIVRNEKRMLQEAVDALFDNGRRGRAITGANKRPLKSLSDMLKGKQGRFRQNLLGKRVDYSGRSVIVVGPELKLHQCGLPKKMALELFKPFIYSKLEKYGHATTIKAAKRMVEKERPEVWDILEEVIREHPVMLNRAPTLHRLGIQAFEPTLIEGKAIQLHPLVCTAFNADFDGDQMAVHVPLSLEAQLEARVLMMSTNNILSPANGKPIIVPSQDIVLGLYYLSLEVPEYRETPDEAVIKDGKIVTAAPPAYSDVAEIESAMLSGSLKLHDKIRLRLPTIDADGKSVRQTIVTTPGRALIAQILPKHQAIPFSLINKQLTKKNVSDVIDTVYRHCGQKEAVIFCDRLMGLGFRHAARAGISFGKDDMIIPEAKATLVGKTSEEVKEFEQQYQDGLITAGERYNKVVDAWSRCTDEVQAAMLKEISKQVIGKPTNSVWMMSHSGARGSPAQMKQLAGMRGLMVKPSGEIIEQPIIANFKEGLSVLDYFTSSHGARKGLADTALKTANSGYLTRRLVDVAQDCIIVEPDCGTERGLTVRAVMDSGEVVASLSERILGRTLSKDVIHPVTQDVILPRNTLIEEAEAELIEKAGVESVDIRSVLTCDSRVGICAHCYGRDLARGTPVNIGEAVGVIAAQSIGEPGTQLTMRTFHIGGAATRGAEQSMVEASRDGIVTIKNRNVVENSQKVLVVMSRNCEILLTDENGVERARYRVPYGARLMVSEGEAVTRTQKMAEWDPYTLPIITEQAGTVEYLDLIDSITLVERMDEVTGLSSKVVVDYKQAAKGVDLRPRLQLKDASGNVVKLANGNDARYFLSPDSILSVENGAEVNAGDVLARIPREGSKTRDITGGLPRVAELFEARRPKDHAIIAEGEGRIEFGKDYKSKRCVIVKNDDTGEETQYLIPKGKHVSVQEGDFVQKGDPLVDGPRVPHDILKVMGVEALSDYLVNEIQDVYRLQGVKINDKHIEVIVRQMLQKVEILEPGDSTYLIGETVDRIEYEGENQRLMENGDTPAKAMPVLQGITKASLQTQSFISAASFQETTRVLTDAATSGKVDTLNGLKENVIVGRLIPAGTGSVMNRLRGIAASQDRQRVGGTSPKAVEDAAE

SEQ ID NO: 148 - protein, 74 aa, Gluconobacter oxydans
MDADLEQYLEAGVGRLQDDASTCSRMKGLEKKVSSAARETEALVSDLMVDQPLFWLLTSFFIGILLGKGLFRKS

SEQ ID NO: 149 - protein, 308 aa, Gluconobacter oxydans
MKSPSDTLRSLFRRNRDAASSAPAVQAESLALPALVLEAEKIAASLQSGVHGRRRSGAGEDFWQFRPYHAGEPATSIDWRQSARSPVEDTFWVRERERENAQSLMLWCDPSPSMQWRSSDVLPTKAERAQLCTLALASASLRGGEHAGLLTGIEAGRALAGRQVLPRLAASLLRPDADEPEFPRMALVPARSDLVVISDFLWDEDRIDTFLKTCASRPVRTHLLCVLDPAERELKRSGRIRFEGLEGGVLTLPAMESLGPAYEQAMNAHLAALKQSAASLHADCIMHDTSQNPLPALLALHMALGGGR

SEQ ID NO: 150 - protein, 147 aa, Gluconobacter oxydans
MDVGFYHLTRTPLEEALPALLGRTLDAGERALVRCPDAAAVMALDAALWACRDPVWLPHGTAKSGHADRQPIWLTEGEDVPNGARFLFRVDGAGSDEFAPFTRIFDLFDGGNPQSVQRARQRWVAMKSSGHNLVYWKQEERGWKKAG

SEQ ID NO: 151 - protein, 450 aa, Gluconobacter oxydans
MRSVSTSCPDRALHILASLFHVDPVSLCLALLVIPACVQAMQPGRPGRAVVLCLATLAAVLGLSPAVQAVALGVIAAQDREACPAVWSVPALLLSALFPAQTFVVLAVLPVLFWSALVRRSDGEQEGGPFPAVMGILGVSLVWHAPAAVSAELVAGLGAAVIGLLGRSVLGACRPGDLGLLRPVLLMVLVVAAQAEGLAVCARIALEAILLDLSLLVLTAALGRVFPVLSVLRLPFPPLPGLVVLWLGIHAALGMAAGIEGWSVLGVAVALLLGLLGLSDILVVGRVFSAWQGRVSGVSVLLVGAGSLLLPALVFGVVSPVLHFMGGEWVWPVWRMGGGDGASLRLPAFVLTGAVLWCVLVRPWRVAGGIVQAASTLLPALGNLLSVGDGLFEEAPSLGWKIRCVIVAGRRRFMAVRGVKAPVLPDLRQGAVGLWLVLLGLVLAVLGVMA

SEQ ID NO: 152 - protein, 479 aa, Gluconobacter oxydans
MIGMGRMIRSGERVALSHYHLDAEQWSAMLSAPGTTLPLISCWADDARAYVLLLEGDRPLVASTAVEERRYLAPSSRFAGAEWGERVAYDLYGVEAMDARGNGAPALDEGGWTSTWPLSSRPGPAAGGLRPLAGRHLLRPEQTGLSGPLELSFEVLKGKVRSVEVCAGGAHRGVMSRLLGRTPEEAMPLVSRMTAGGFVAHPLAFARAVAQARGLVPGPGIRDVWMLLLEIERMSLHLFDMARTARGVDAELFATHCDHAREAIARACAEQGVSRRLMDMVACDGFREGLEIVPLAQAVHAAMQPRLAALEELHRVFAPRLDGFAVLDVRLAERFAVGGVTGRASGRSMDMRRREAGMRLEALRATGSSQGDARAREGLRLAEIRDSLKLLERILGSIGLEDDEPAPDRTDEGIGVAEGARGDVWYWVRLKDGRIESLHVRDPGVSLLPVLGAMLRGYPVSRVPAALGSIGISPAGIAL

SEQ ID NO: 153 - protein, 246 aa, Gluconobacter oxydans
MLTSLARIRSDDAATFYESRQGQRTALLLNGRLQSIMPPMRGRRILGIGYTAPYLPESAEFAVSGRLLHPQTQRTTRPTRSQTRNISWADCIVSSGRLPFDDLSMNAVLVVHGLEFTRFAPDFLRAIWRTLSDDGILTLVVPNRSGYWAHTDATPFGHGIPYSSGQLTRLLDQALFRIEHHSTALMTPPAALSVTHGRLMERAGRTLRLPCGGVHVVTARKNVYAGTPLIDEKLCVPLPRQVAEPA

SEQ ID NO: 154 - protein, 238 aa, Gluconobacter oxydans
MPLDIKPIPVLSDNYAWLLTAMEGQRAVVDPGEAGPIMDEIGEGRLDMILLTHHHADHTAGTDALRERYGAKVYGPRQKREWLPRLDHDVEDGDSFSLGSAQIRVLSTPGHAVGHVSYVVPGVPALFCGDVLFSLGCGRLLEGTAQELFDSLHRYDSLPDRTLVCAGHEYTRSNLAFALHVDPDNEALKARAAEVEQLLEAGRPTLPVSLGVERKTNPFLLAPDVATFARLRREKDTF

SEQ ID NO: 155 - protein, 302 aa, Gluconobacter oxydans
MSAPVSPGLRSGSLPLLVALMTLLAGLSLAGLTGVQTLAEGWAGAARNATTIEIPSDTPQLEDRTRALIQTLHKTPDITTVRELSPQQVQTLLAPWLGQVSDSGHLPGLSLPVVLIVAHTGTPDLGRVVHEALPEAVVEEDRRWGERLNGLGSSLVACAWLAVSLIAAIAVLSVGMTVRRSVMAQRKAVEIVHFLGAGDVTISSRIAGRAALLSLAGGLAGLFSLSPVITMLARKLAPFSHDAGSAALPATTWQTMLASWWNTLHVLPRLLLEELGALPLIAACLGWLTAQTVVLVWLRRLP

SEQ ID NO: 156 - protein, 164 aa, Gluconobacter oxydans
MRIECPHCHAVFEVPEALAKGVKRLRCANCGDSWELGAAAVSKSEEAPDGAVAAPEVFEVPEEGVAAAPAVADSPVSGTEGTFRATGAMASRSNARRSAVLHSRSAGDVQVPTDTAGPSMIGSTGAWIAAWGASLVLAGGGVAALWYCKGAGVFGFLPGAGHFS

SEQ ID NO: 157 - protein, 331 aa, Gluconobacter oxydans
MTVLSADPGRIAERLPLLERRTQMVRSVRTFFEERGYLEVETPFAVPVPGEEVHLRCFRTELERPDGSREARFLHTSPEFAMKRIVAATGRPVFQMARVWRNGEASNTHAPEFTMLEWYRPGADLSSLMDETEAFLRALLPPVVHRGMDVIDLSLPFERLTMQAAFARYVGADLLGTAGNAEALAAQAHVGLRNGENWEDLFFRLLLERIEPVIGRERPTFLTHWPAEQAALARRDPEDGRAALRFELYVGGLELANAFEELTDPVEQRERFATDRKRRVELSPDQDWGLDEDFLAALPDLPPCSGIALGFDRLVMLATGAPRISDILWLA

SEQ ID NO: 158 - protein, 114 aa, Gluconobacter oxydans
MGQVSIRLNGYVYNVGCQDGEEAHLYDMARHVEGWLQRARTLGGAASESKTLMMAALLMADEIFELKRRQISPQAETQIQQAEQLLRLEGARQERLARLAGQAELLAAELERAS

SEQ ID NO: 159 - protein, 1231 aa, Gluconobacter oxydans
MKPWRIGRLFRTSLPADHHIRQGNAHNSDRNWAQAARAYQAALAVDPGLAHIWIQLGHALKEQGDLSQAEHAYRQATLLSPHDPDGWLQLGHLLSLAGNVRDSITALEEGQRISGDPLFAAQDIAALRERQKQPQRSWRQPEWVTPDITGLWTSEGFCPAGMELFDPWAYWQINPEVRQMFDIPVALDLVQHFCTFGVSICLPFSLIESFDPDFYRRFCLNGIAFTDAGAYRHWLTTGIAQHVPANEKRWIQSLLGDRITKLEDVDPLLSSAFRDENAATHTQRTLVEGFISDLLTDPQRPVTPTPRNAPLLHAIACRGEKGTELHQEGARRLREKIYLHVPTYRENTRALTRTMTTQGLDIAAHPLLKDLARHPDEPAETLIALANCENRLGSLDAAVTTLRTATGKKPGRPDLRLCHDLQEDRNYHHAWNAALALARTGQLEAGQRHLRAYLDSLPFMLPDHRPLRPRSGAVAIVGKLNLLQCRLYRVEQRRDHLLAAGYTVEIFDVDTDLDVFTAKIAAFESVIFYRLPAWPAVIRAIHLARSLGLTTFYDIDDPLFDADLYPEPFETYGGTISRETYYGLALGVPLFAKALSLCEYAIASTEPLAEQMRHHHIGEVFVQPNGLGEAHAIAMRRHGSQSPSPDQPVTIFYGSNTKANRSEIVSVLEPALMRILKKHGQRVRLCIVGDLPEDSVLRNLRENITLLPPLPDVQAYWSLLSSADINLAILGQSPTTDTKSGIKWLEAAMFGIPSVLSDTAGYRDVARENETALFATDTDSWVRALDQLVTDPALRTRIGKAAYTHALTTYSATPLASHAKAFMERTAPPDTTARHRILGVNVFYPPQAIGGATRVFHDNLSDLSTPEDRRFLFEVFTSQVEPDSKKLRVYAQDGILVTSIAPLDVDDKDRIAEDPNMVAQFRKVVERFRPHLVHFHCIQRLTAGIIDVLLELDIPYCITLHDAWWISDRQFVIDELGQPRLYNYSSPLETLERCGAKAVARMESLRDRLFGAKAVLAVSEAFAELYRTAGVHQVQTIENGVSVLTPRPRLREESGRIRLGFIGGLARHKGWDLIQIALRAGSFHNLELLAIDHAMSPGDERTDVFGQTPVVFRGKMSQNEVADLYASIDVLLAPSIWPESFGLVTREATLCGCWVVASDRGAIGDTISDDINGFRIDVSSAADLRRVLTLIDESPARFRQPAPELKISRTARDQAQDLGVLYEKLLQPGET

SEQ ID NO: 160 - protein, 124 aa, Gluconobacter oxydans
MIFPFKSAPRLRDLARNADTARDAKQWPEAALAYRNLLTRYPDRVDMWIQYGHALKESGYLVDAELAYRQAIQRSPTQAEGYIQLGHALKLQNRREEAAAAYREALRHDPDATVATVELAALGF

SEQ ID NO: 161 - protein, 381 aa, Gluconobacter oxydans
MNHHGIAALHRRADRVLPRIFRDYVNGGSHSERTVRANRRAFDRWAVVPKCLVDVSECDLSGSFLGATHRLPFMFAPLGFGGLMYPDGEIRAARVAAASGLPMAVSTFAIQSLETLSRVPGVTLAAQIYVFRDRGITRDMLRRAESCGIRNIILTVDTPITPLRLRDVRNGFRNLTRPSLRHVLSMAAHPRWTAGMLRNGMPKIGNLAPYGMGDNLMEQARNAASQIDPTLTWKDLDWLRSVWPGQLAIKGIMDAGDALACQKAGAQTVIVSNHGGRQMDPAPSSLSVLPDIVEALKGETDVILDGGVRWGGDVVTALALGAKAVGIGRPWAWALAAGGERGVRSLVDGLGGEIRDVLRLGGMVDLASLRAQGAAALRPVS

SEQ ID NO: 162 - protein, 162 aa, Gluconobacter oxydans
MMMPRFFRCLPLALLVVLTACGNRYEYSRASFNGPLQCAPYARERTGLKLSGSAASWWGQSVGRYAHTHTPRPGEVLVFRATSRVPSGHVSIVRRQVSDRTILVDHANWEPGRIDRAVPVTDVSARNDWTLVRVWWAPVHSLGKRAYPTYGFISSHDSDDSS

SEQ ID NO: 163 - protein, 560 aa, Gluconobacter oxydans
MSDSRNNRGEPTVSPKEAPVRRTRFSLILLIPVVAILIAGWLAWEHFATRGPVITITFETADGLTPGQTQVKNKAVTLGTVQDITLSDDMKHVDVTVQMNANSAHILTDHTRFWVVRPRINGASITGLDTLFSGAYIALDPGSDDGHYQKFFKGLESPPGVRSDQPGETFWLVSPSLGSLGPGSPVFFRDLQVGEVLGYTMPPGGKGPIVIQAFVKEPYDHYLRTDSRFWNVSGVQVGLGAGGLKVQLKSLQALFSGGIAFGLPERRRNIDLPDAPANSVFKLYASEADADNARYHKRLRVVTYINSSVKGLTNGSQVTMFGLQIGTVTDVRLLLEGPTKLPRVRVDMELEPERMLSNWDDRIENSKEPPVEKYLQAFVADGMRASVQSASFLTGESMIALQFVKNAPVTTLTYEGDVAVLPSQAGGMDGIMESVSTITDKIAAMPLTEIGGHVNDLLAHADGRLNSPEVTQSLAALRDSLQNLSRLTKTANQNLPALMKGLQGTLANAQSVLGAYGGDTDFHRSLQNMITQLTQMSRSLRFLTDYLDHHPSALITGRRN

SEQ ID NO: 164 - protein, 439 aa, Gluconobacter oxydans
MIPGFLQSPYGPPSFGAPYGTTHALGDWWGAQPWLQKHGLYVAIDDYESLSGNPIGGKRQSETDTGQTAVTLDVDFQRLLEMGTWSKNFWLHMLVLNGHGRNLSQIFGDNGNQVQQIYGARGNVVAHLVWAYFEKSWLQNRIDWSVGWIPTGTFFNNSPWVCSFMNVWMCGNITPTKYLTGGRDWPSGNIGTVLRLMPTSHFYIMGGLFAVSPHSYNGGISGWAWGQDGLGKLSTEAELGWIPEFGKDHLIGHYKVGAMYDNSKYDDLYDDRYGHAWIVSGLAPRKQSGQISAWVLADQMLLRHGEGATNGLILAGAYSYAQGQTSAMNHHLIAALMDTGHMWGRSLDSIGIAFQWANFSRSATLAQEAALTAGQPFQSSNFGTPYGIQGHENIYEFFYTYHVMTGMTLQPDFQYINHIGGTTVFKDAVVFSLAFNVSL

SEQ ID NO: 165 - protein, 107 aa, Gluconobacter oxydans
MRALLFLAVLTGSGLALTDVSAGAQELRRDGLSAHAVLTDEVSQSGVDHRMLECRTDPRLLHTVWDGRPSPHPEPHVCTGGANRLGAGYVRYLATSRMVKAHKPLRG

SEQ ID NO: 166 - protein, 384 aa, Gluconobacter oxydans
MPNHPYFRATLMAALAVFSATGLSACGPMGPGKLRNDQLEYSRALGDTQKHEMLLNIVRLRYADPPTFLDTTQVIAGYSVSKSISGGFYAYPATAVGNYLFGTGTMSLGESPTFTYQPVTGQQYAENVVRPISPTVIMPLSLGGLPIDTLLRLTAQSIDGLSNVRGLGAGPSGGGSVRFYLLLHDLRQLQIQGAMTIRITSETPPPPDSKKNGGKSDSNGNGGSSTGTERSYLVLTSTSDSNLLAIQAEVRRLLHLDPGAEEAEIVYGPYPKHPGKQIAILTRSMLAMLTQLAYEVEVPEDDIKSGRTPPTIGQVGIENRPEVVIHSSREEPDSRYAAVSYNNTWFWISDRDFQSKLAFTMVQVLAALAATNHTAGAVVTIPAG

SEQ ID NO: 167 - protein, 371 aa, Gluconobacter oxydans
MKIAFIYIAEPYQCYHTASVASALAAIPGHDVVEYYSFPETVEHLSRIRQALDVPALPLKAFPKSLKARLLKRARRLDQERLVVLRENIAELNRYDAVVATEYTAGVLKEMGLSSPKLILLMHGAGDRYVNDEHLVREFDLTLVPGPKVEGYFQDRGLLRPETTRVVGYPKFDVFEAVQREKTISFANGRPFALYNPHYQRKLTSASGWMMPLIRGFKAQSDYNLVVAPHIKTFHRGFGIRERQLKRQRSPEVMVDTGSSAMLDMTYTSQAALYIGDVSSQVYEFLGIPRPCVFLNPRKLPWQDDPYFLHWTLGEVVEDLDDLMPAIARAQERHALYRPAQEKLFRETFGEPLLGASQRAADAIAQFMSVA

SEQ ID NO: 168 - protein, 318 aa, Gluconobacter oxydans
MTTKPAGTPLSVPDDATVASVSTPASTPAPHTLASSEETLRQMETLSTLSLNREGGFQELRGGTLGVRIAETAEERDAAQALRYRVFFEELGARPDERAFRTKRDVDEFDEAADHLLVIDHAKGPGAAGVVGTYRLLRSDAAEKIGRFYTSSEYDISTLTEFPGRLLEVGRSCVAKEYRGRSAMQLLWRGIASYIFLHRIDVLFGCGSLPGTDPDALADQLTYMHHNHLAPPALRIRALPDRYVEMQRTDPHVLDYRACLNKLPPLIKGYLRLGGYVGDGAVVDEQFNTTDVAVLVKSELLADKYYRHYERRLRDALD

SEQ ID NO: 169 - protein, 165 aa, Gluconobacter oxydans
MLGREIRTARLVLTPVNWPDLEDMVALKGDAGAFARMLGGVRNRTTTEEEMAEDVSFWARRGVGIFAIRENGRFVGITGVHERPDGRGLGLRFALFPWAAGRGIAREAAAAALRYVLDCGEKRIVAVAREDNLASRTVLGSLGLHHTQTFDRNGDTMLLYEITAD

SEQ ID NO: 170 - protein, 150 aa, Gluconobacter oxydans
MIPDLKILDALMARMQALGITELDYSRDGEHIRLVRDAQDSSPQPTSPAPAAAASTLPVFETASTPPKAETTIDAPMHGQFYASPTPDAPPFVKPGDIVAEGQPLYILEVMKTLSRIEAEFPCRIVAVLAANADAVSPGTPLFTVEPLDA

SEQ ID NO: 171 - protein, 944 aa, Gluconobacter oxydans
MPPEKPDLGKADLEKPHLVLIDGSGFIFRAFHALPPMSSPQGVPVNAVYGFTNMLARLLRDHVGTHLAVIFDAGRTTFRNEIYPQYKAHRPEAPEDLRPQFGLIRDATAAFNVPSIELAGWEADDLLAAYAKAAVEAGGCCTIISSDKDLMQLVRPGVELMDPMKQKPIREAEVEAKFGVRPDQVVDVQALMGDSTDNVPGVPGIGPKGAAQLVNEYGTLEQILEAAPGMKASKRRDNLIEHADAARMSRRLVLLDDNAPMPQPISELGCREPVRETLRDWLEEMGFHSTIQRMGLGLAAKPRPFTRQIVRPEDKAAARDEVAAVTIPDAPYGPYETVTDMDALDRWIADARTAGVVAVDTETDSLNARQANMVGLSLSVAPGKACYVPFLHETIRDLLEEDSTGEAFVRQLDRTEALERLKPLLQDASVLKVFQNAKYDLTVFRGAGIPEISPIDDTMLISYAQSAGEHGQGMDELSELHLGHTPVTYDSVTGTGRKRIPFAQVAIDTATAYAAEDADVTLRLWQVLRPQLRTRHALALYEEIERPLIQILTDMEEVGIKVDATELRRMSADFAERMATIEQEIHEQVGRSFNVGSPKQLGEILFDEMGLPGGKRTKSGSWGTDSGVLESLAEQGHELPQKILSWRQLAKLKSTYADALVQQMDQDTQRVHTSFQMAITTTGRLSSNEPNLQNIPIRTEEGARIRKAFVAAPGCVLLSADYSQIELRLLAHVAKIEPLLEAFRLGQDIHARTASEVFGIPLEGMDPLTRRRAKAINFGIIYGISAFGLAQQLQISPGEARSYIDAYFARYPGIRAYMERTKEEAKRHGYVTTPFGRRCYVPGITEKNGARRAYAERQAINAPLQGGAADIIKRAMVHLARRLPAMGLKAKMVLQVHDELLFEVEEQDAKALADFVRTEMEGAARLDVALEVETGIGPSWADAH

SEQ ID NO: 172 - protein, 551 aa, Gluconobacter oxydans
MKRGAALLAASLLLGAGAFPALAQEQTPPDWNGITLGSPHRGGTLHLTADGPGGTLDPQINYGTQYMQVFVNMYDPLLTFRLARGKAGLEVVPDLADAMPQISPDGLTWRLHLRSGLHFSDGAPVRVEDVVASFRRIYRAGSPTAASFYGGIAGAGECLETPDRCTLSGVEGHPETGEIVFHLTKPDGEFLYKLAFPHAVILPASTPVHDMGGTTVPGTGPYRITQYDPGHGMVLERNPYFHVWNPQAQTDGFVDRIEYDFGLSDEAQVTAVEQGRYDWMLDAKPADRLGELGANYTSQVHIEPLLGLYYLAMNTHEKPFTDVRVRRAVSMAVNRHAMTILFGGSAISEPLCQMVPHGIPGADLGLDCPQDMEGARRLIHEADADGASVTLVVPNRAMELGMGTYLRNALQSAGLNVQLRPITAGLAESYEQNTANHVQIALSYWFADYPSASTFLDDLFGCDNYHPNSAVSPNYTGFCDQHVQSLFDQAKAQTDPAKAAPIWQEAGHVIMEQMPGAPMIQMRTVDFVSKRLGNYYATLLSHMLLSHVWVQ

SEQ ID NO: 173 - protein, 288 aa, Gluconobacter oxydans
MIAPSFTAGHWGQGMLTRRTLVSGLSGLPLLSPVAAFGRHPLHKKLPAPAVHRGAVPPKPLVMLDPGHGGKDPGAIGISGTYEKHIAEAAASELSRQLLASGQYRVAMTRSEDRFIPLEGRVELAQRHQAHLFISMHADALHDRDVRGASVYTLSSGASDAQTASLARTENSADRFAGPAFHGMSPDVQQILASLVSEETRRGSAHMAASVVNSFRNRIGLLTHPSRHAAFVVLKSSEIPSVLVEMGFMSNRLDEAALRQAVHRTQVASAMKTAIDRYFATHAGVMTG

SEQ ID NO: 174 - protein, 379 aa, Gluconobacter oxydans
MRLRTALLAMTSMVAAPSLAMASTITGPYVNIGGGYNLVQQQHGSFSPTTQADGTSSNAASSSRYRHHDGFTGFGAFGWGFGNGLRVEVEGLYNYSQINHRRPTAVNGMTHGSDQAYGGLVNVLYDIDLANFGLNVPVTPFVGVGAGYLWQHYNPTTTNYVNGAVDRMGGTQGSFAYQGIVGAAYDIPNVPGLAVTTEYRFIGQDFVNGPYRSTAYNASGVHKGNVNFDQRFSHQFILGLRYAFDTAPPPPPPAPVVVPPAPTPARTYLVFFDWDKSDLTGRAREIVAQAAQASTHVQTTRIEVNGYTDNSAAHPGPRGEKYNLGLSNRRASSVKAELIRDGVPAAAIDIHGYGESKPLVPTGPNTREPQNRRVEIILK

SEQ ID NO: 175 - protein, 498 aa, Gluconobacter oxydans
MKTVFILLTVLAVGFPASHLPGTARAADARDTLSIGLAIEPPGLDPTRGSSEAIGMVTYGNIYEGLMRLDEQGALTPLLAQDWHISPDGLTYDFTLHDGVRFHDGTPLTCDSVKFSLLRAGAADSTNPHRAIFSQITNISCPDSQHVSIRLQHPYGSFLYQLAWNDAAILSPASVDQNISHPVGTGPFMFGEWRRGDHLTLTRNPDYWGASPALRSVTFRFMPDPLSASNALLAGELDAYPSFPSREILSRFTGNTQLQVVRGSFPFKAILALNNARRPFSDIRVRQAIAQAIDRKALIQAVADGDGTLLQSHIAPDDPDYVPLPDRYPYDPEHARALLKEAGVAPGMHLTLTFPPIGYARDSSELIAAYLEQVGLIVTLQPVEWPTWLGQVYGQGQFDMTVIAHTEPHDIAIYDRTPVYFHYHSPVFHGLAEQYEATADTVRRHQLSVQMQEQLAQDEPNVFLFAIPRETVMNRRLKGLWTNQPIAGCPVAGVSWAP

SEQ ID NO: 176 - protein, 272 aa, Gluconobacter oxydans
MSSLLHVRNLGVQSPDRPILHDVSFTLEPGQILAVTGESGSGKSTLALSLMGLLPPGFQAHGSIRLEDTELSTLSEQDWCRIRGKRLGMVFQEPMTALNPTRRIGTQIGDTFRLHTTLSRHEIDTEMRMLLEQVGLSEAGVSERAYPHQLSGGQRQRVLLAMALACQPELLIADEFTTPLDARTQATMMALVTRRCETQGMAVLMISHDLGLVRHHADHVLVMKDGACVEQGATASVFDAPRHPYTQALLAMSLHGAARTPLTPLPIFTAPS

SEQ ID NO: 177 - protein, 342 aa, Gluconobacter oxydans
MKTLLPTSTAGSLPKPSWLAKPETLWSPWKLQGEELVEGKQDALRLTLDDQDRAGIDIVSDGEQTRQHFVTTFIEHLGGVDFEKRQTVKIRNRYDASVPSVVGAVTREKPVFVEDAKYLRTLTKKPIKWALPGPMTMIDTLYDGHYKSREKLAWEFAKILNQEARELEAAGVDIIQFDEPAFNVFFDEVNDWGIATLEKAVEGLKCETAVHICYGYGIKANIDWKNALGAEWRQYEEIFPKLQKSSIDLISLECQNSRVPMDLIELVRGKKVMVGAIDVATNTIETPEDVASTLRKALKFVDADKLYPSTNCGMAPLSRRVARGKLNALGAGAEIVRKELSA

SEQ ID NO: 178 - protein, 327 aa, Gluconobacter oxydans
MSVEFTFNIKKIPFNEDYTPSDSTRLTTNFANLARGEHRQENLRNVLCMIDNRFNSLAHWDNPNGDRYSVGVDIISAEMTIRSEGKNESFPLIEVLNTSIFDKKDDKRIPGIVGNNFSSYVRDYDFSVLLLKHNKDQSEFRTPDRFGDLHGNLFKCFINSECYKTHFRKMPVICLSVSSNRTYYRTRNHHPVLGVEYEQREFSLTDQYFGKMGMKVRYFMPENASAPLAFYFFGDLLFDYSNMELISTISTMESFQKIYRPEIYNSNSPAADCYQPSLKHQDHSVTRIIYDREERSQLAIAQGRFTEESFIKPYQDVLEQWSAHYSV

SEQ ID NO: 179 - protein, 452 aa, Gluconobacter oxydans
MPRPVFPFRTTVRTLSLIRAGAAFGLVGLLAACAGNNADMGGGSELPVSQEAANYRAHAKSYYAPPGPPSDPWGPYIQEASNRFDVPEAWIRAVMQQESGGHLFDHNGNFITSVPGAMGLLQLMPPTYDDMRQQYGLGEDPYDPHDNILAGTAYLRQMYDIYGSPGFLAAYNDGPGSLDRYLRRGRALPRETRRYVAAIGPHIAGITPHNRSAADLLVAQHDPNSQVMLAQNTPSADIAPVTSASERQAVSAAWNHRETADTSSDDSDSDTPAATPQTAPVQVASAAGSEAPASISAAWAARGFTPTPARPAVRQASVPDDEVADNRVTAQEIPIGHHLQPQPIMAVMPASRVQPRISLPAISTSSRAATGNWAIQVGAFANAKQASIATSAAHSKGGVVVASARSQVESVKGGRSHLYRARLTGLTHENAVAACRRLSHGSPCVVVPPGAY

SEQ ID NO: 180 - protein, 392 aa, Gluconobacter oxydans
MSDHKTDHATKMTWTPEATCGMARAGHLHTRHGTVPTPTFMPVGTVGTVKGMTMDAVRSTGAGIVLGNTYHLMLRPTADRVQKLGGLHRMMDWPGPILTDSGGFQVMSLGALRKLDEDGVTFRSHIDGSKHRLTPEISTDIQFKLDATITMAFDECPALPATPEVLRKSMEMSMRWAARSREAFVAREGYGQFGIVQGGTERDLREYSIKALTDIGFEGYAIGGLAVGEGQELMFSTLDFTTPMLPQDKARYLMGVGTPDDLLGAVMRGVDMFDCVMPSRAGRTARAYTERGTINLRNARFADDTRPLTPHDDTPVAGRYSRAYLHHLFRANEMLGPMLLTWHNLAYYQRLMRQIRAAIVDGTLDALAVKLRADWAKGDWTEDEWPMPDLTL

SEQ ID NO: 181 - protein, 550 aa, Gluconobacter oxydans
MTGSRWLQGLRLSLARLPFGGPASEGPVHAFRDPWKGDPDQGARLIGGHFRFDRQDYPLPNGNWERGPWPEPVREWLHGFSWLRDLRTLGSDRARLTARGLVSDWLAHPPTDPLVRDACVTGSRLAAWLSNHEFCLASADPRLQQRLMERMLVEGRTIAALLPLPPQGVRGLMAFRGLLAAAMAMPEQTGFMSRFLRYLPGELERLVLADGTVAERSPEAQFLVTRELAEMSVMFRTAHASVPPFIDRALDRVCPVLRAMRHGDGGLAVFNGTNERHSAAVEDVLAQGSRQKLIAPAMPQGKFTRLALGKSLLLVDSGPPAPAGFDSMAHAGTLSFEFSHQRHRLFVNCGSAVVGAWRDAMRCSAAHTVLVADGLSSADFGPDGGMTRRPVTVSCDHQTDGAAHWLDLSHDGYHAPLGAKWTRRLYFGSDGEDLRGQEIIDGERNIDFAIRFHIHPDVKVTQDDEDIILQVGGTIWRFRQRDGVVRLENDVYLGRGKREICQQIIITPRALPDAAPQEGEAAPADEKTDAGKAVRRTHQSVTWLLERIPE

SEQ ID NO: 182 - protein, 198 aa, Gluconobacter oxydans
MKHIRADKSNLSDIVTVAAGHPFRGKIEPIEGAETAVVQMRDTSPSGMDWTSCVRTEVAGRREPDWLRPGDILFPARGNVSLAVLINESIGSLQAVAAPHFFLLRVSRSDVLPAYMAWWLNQEPAQRHLEQQAQSSTLVRNIARPVLEDTPVILPPLPRQRQIVELANAMQREEDLLRRLRQTNQQIMTGLARDLLAG

SEQ ID NO: 183 - protein, 374 aa, Gluconobacter oxydans
MAADSLSRHLADRKTPWPHFNQYLVAYLSYLLFYPVPWLLGYHRPTLAGVLFSTAAMLVFLLVYFAPYRKDRYYGYGEIILTDLIGYACAWTHGDWEVYCIFAAGMCARLPGKRQSVTMVILLQVVLIISGHFRHKTTLEVIPGAFFSIITYMGTLVQWQLGIRNFELREAQNEIRTLATTAERERIARDLHDLLGHSLTVISVKAELAERLFTSDTSRARHEVTEISQIARTSLREVREAVSGMNGASLQRELDRARKALNTAGITLVLNGPGPSTDQPQNSVLALALREAVTNVIRHSDARTCTLTFQHTAEGHIHTFTLEDDGPLQTTQSAPAIIEGNGLRGMRARLAASGGTLTVSPRPQGFKLTATTLP

SEQ ID NO: 184 - protein, 84 aa, Gluconobacter oxydans
MTSEPSSSAGSRAVQEVFLDHLRRTEASVTVFLVNGVKLQGIVAQSDAHTLLLRRDGHVQLVYKHAVSTIMPVAAMSHFVEEEL

SEQ ID NO: 185 - protein, 212 aa, Gluconobacter oxydans
MRVVVIDYNGGNLASAAQAARKAAIRKGIEADVVISRDASDILNADRLILPGQGAFADCAQGLGPELRNMLETATANGTPFLGICVGMQLMCEYGLEHGRTEGLGWISGNIRRMDEAANAGLRLPHMGWNTLDFTPGAHLLTDGLTPGNHGYFVHSYALHDGTDSDLVATAQYGTQVPAIVARGNRCGTQFHVEKSQDVGLTILGNFLRWTS

SEQ ID NO: 186 - protein, 331 aa, Gluconobacter oxydans
MNDVTLVTGATGFVGSAVARVLEERGHRLRLLVRPTSDRSNIAELNAELAVGDLSDPDTLAPALKGVKILFHVAADYRLWVPDPETMMKANVEGTRNLMLAALEAGVEKIIYCSSVAALGLRSDGVPADETTPVSESQVIGIYKLSKYRAEQEVLRLVREKNLPAIIVNPSTPVGPRDIKPTPTGQMILDCASGNMPAYVETGLNIVHVDDVAEGHALALERGKIGEKYILGGENIMLGDLFRMVSQIAGVKPPSVKLKQSWLYPVALVSEWLARGFGIEPRVTRETLAMSKKLMFFSSDKAKKELGYAPRPARDAVTDAIVWFRQHGRMK

SEQ ID NO: 187 - protein, 879 aa, Gluconobacter oxydans
MSGWGRETLPVLLRVGPMFSDLTGRLNAVCARRAPLVLALFALLCAGCVALSVTRISVTTDTSKMFANTLPWKKRSMELTRLFPQDSNQLVAIIDSRIPEQGRMAARQLAATLSQDHTHFKTVSLPGDNAFYNSHGFLFLDTKDLEPLLDSIVSAQPFLGTLAADPSARGLFGALGLIGEGIKAGQGIPSGFDGALDGFANSLTAAANGHPQDMSWQNLLIGKLAELGSQYEFVVTQPKLDYSSFQPGEGATTAMRQAINNLEFVKTKQASGIITGEVKLSDEEFSTVAHGMVLGLVISLVLVAVWLILAVHSPRVIIPILLTLISGLLLTTGFAALAVGELNLISVAFAILFVGIAVDFAIQYSVRLRGQRNPDGSHPSLHDAIILTGQESGAQILVAALATAAGFLAFYPTSFIGVAQLGLIAGFGMLIAFFCTMTLLPALLSIFHAKLGNGTPGFAFMAPADAFLRHKRHKVVGVFALLGIVGLALMPLLKFDADPLHTKDPNTEGMRALHLLEANPLTTPYSAQVLTPNLTEAARQAAAFSKLPSVHDVLWLGALVPDDQKTKLAMIEDTASILLPTITIANPAPAPDAAAIRAAAVTAAQKLDAVKDQLPAPLEKIRQALHTLSTAQDSTLLQASTSLTRFLPDELSMLRTALQPTPVTMESIPQDVRQDYVLPDGRARLTIHPKGQMSETPVLHRFVRELRSVNPDVAGPAMEITESANTIVHAFTVAAICALIMIAIILLVVLRRLLDAALVMAPLLMSALLTVILVVTVPETLNYANIIALPLLLGVGVSFNIYFVMNWREGVKGPLTSPTARAVLFSALTTATAFGSLARSGHPGTASMGRLLLMSLGCTLLCTMVFVPALLPKRPIDEA

SEQ ID NO: 188 - protein, 259 aa, Gluconobacter oxydans
MAFILHLVFRPASAEAHGSACMLTRKQHQLLLYIDDHLRRTGYSPSFDEMKDALELRSKSGIHRLISALEERGFLRRHHHRARALEVLRLPHMGTEAPVATGTGTAFVPAVLNQGQTGLQGAFSEDSVANDRQTVSIPLYGRIAAGLPIEAMQDDSDRIDVPVSLLGTGEHYALTVAGDSMIEAGILDGDIAIIRRRETAENGQIIVALIDEQEVTLKKLRRRGSMIALEAANRDYETRIFPAERVHIQGRLVALFRQY

SEQ ID NO: 189 - protein, 369 aa, Gluconobacter oxydans
MNDSTHAMPRHVLIKALNRALLGRFLLCGAVLVSLLEILALLEKTTPILNRHLGVRGILTFAFLHLPALSIDILPLAFMVGALFLLTQMTLSSEISALRAAGLSTPALYRLLLPAVLIAGIGGTCAQYWLVPACENALTTWWNRTDPLAGQDGQPEDNILWFRAGPTLVRIGQIAQGGTFLRDVTIYHRDSTGLLTGTEHTNVLTYRDGQWHPDGAQDLSLSDDKSYVNVTKGDSTFVIPATPSVIMTLSQNGATVTPGQVSAILHKGAPASLPRATYRMALFSGMILPVEIAVMLLLTLPVIYIPPRAGLRNPLPVYVLAAGMGFVILQGMISALGNAGTLPAPLAVSVGPLLGTLLGLTWLLRMEER

SEQ ID NO: 190 - protein, 226 aa, Gluconobacter oxydans
MRILLVEDDPTVRAFVLKGLREAGHVVDEADNGKDGLFLAVSENYDVVILDRMLPGGIDGLRILETLRGQKNATPVLLLSALADVDERVAGLKAGGDDYMTKPFAFSELLARVEALGRRGRPESAPQTRLVVGDLEMDLLSRTVKRGGEKIDLQPREFRLLEFLIRHAGQVVTRTMLLERVWDYHFDPQTNVIDVHVSRLRQKVDKPFDKPMIHTIRNAGYILRAD

SEQ ID NO: 191 - protein, 297 aa, Gluconobacter oxydans
MSVLQRNHLMIIQEVAREGSLTAASARLNLTQPALSHAVRKIEMQLGVKIWRREGRSLILTQAGQWLLSLANRLLPQFSLAEERLEQFANGERGTLRIGMECHPCYQWLLNVVSPYLERWPKVDVDVRQKFQFGGIGAILSNEIDILVTPDPLYKPGLNFTPVFDYELVLVVGSGHRLYGVDRVTPEQLADETLITYPVPSERLDIYTQFLQPAGIAPRQQKQIETTDIMLVMVAHGRGVAALPRWLVDEYASRFDLHSVRLGENGIAKQIFLGRRETDADVQYLTDFIAFAADPKD

SEQ ID NO: 192 - protein, 201 aa, Gluconobacter oxydans
MRVDQRLIAEMIAPRARVLDVGSGDGTLIDYLYRTRSCDARGIEIDMQNVTQSVAHGLPVMHGDADHDLADYPDDTFDYVVLQRTLQAVERPREVLRQMLRIGRHAIVSFPNFGHWRLRLQLLTTGRMPMTPVWNTPWYSTPNIHPCTIRDFLLLCEEEGYVIQQWLAIDEDGARAPWRRSIRLANLFGEQAMFLLKRAGH

SEQ ID NO: 193 - protein, 242 aa, Gluconobacter oxydans
MPDPVSATTSNTPMRIRARGRSFLALVLSPEAPLPLWLEGLDYQIARSGGLFTGKPVILDLGLLSETTPGLATLLDDIRRRGVRIIGIEGGSRHWSAVAHWDWPETLDGGRPAGEVEIPEDPSASAAGPVSGGGTLIIEQTVRSGQSIQHMQGDVIILGSVSSGAEIVAAGSIHVYGTLRGRAIAGVGGQSQSRIFASRMLAELLALDGYYAVTEDIDPAILGQAAQATLDEDRVRVLPLTT

SEQ ID NO: 194 - protein, 270 aa, Gluconobacter oxydans
MAKVLVVTSGKGGVGKTTSTAALGAALAQSGQNVVVVDFDVGLRNLDLVMGAERRVVFDLINVVQGDARLSQALIRDKRCETLSILPASQTRDKDALTSEGVARVMDELREKFDWVICDSPAGIERGAQLAMYHADMAVIVTNPEVSSVRDSDRIIGLLDSKTKKAEQGEKVDKHLLLTRYDPARAARKEMLSVEDVLEILSIPLLGIVPESEDVLKSSNVGAPVTLAAPTSLPARAYFEAARRLSGEKLEVSVPVEKRGFFDWLFKRDA

SEQ ID NO: 195 - protein, 154 aa, Gluconobacter oxydans
MQSTLSGRGGAILASGLVLAIAGTFLVYGNALRKGPDFQGEILHAAFNSANGLHTGANVDLAGVPVGRVVSITLDPRTQMADVAFTVDQRLHLPVDTAVGIGAPTMTADNALQIQPGHSRTTLSGEGKITDTRDQLSLEQQVSNYIFGGGKLGQ

SEQ ID NO: 196 - protein, 261 aa, Gluconobacter oxydans
MNAVLDPIAALGRAALGLIKQAGALALFALEALSHLVRPPFYWRIFFSSLIETGFFSLPVVALTALFSGAVIALQSYVGFGQYHVQSAIAGIVVLAVTRELGPVLAGLMVAGRVGAAMSAQIGTMRVTDQIDALTTLSTNPMKYLVTPRLLAGTLALPCLVLVADILGVMGGFTVSVAKLGFSPSTYITATLDSLKTMDVVVGLVKAAVFGFLIALLGCYNGYNSRGGAEGVGSATTAAVVGASILLLLFDYLLTDLFFSQ

SEQ ID NO: 197 - protein, 437 aa, Gluconobacter oxydans
MTRSSLPDAPDNTPQVIFALATGPSRAAIAIMRASGSGSDTILKALCNGRLPEPRRVSLRTLRHDGEVLDHAVALWLPGPNSYTGEDGFELHLHAGPAIIARVADALTDLGARPAEPGEFTRRAVQKGRLDLLQAEAIADLVDAETESQRKQALRQADGALSRLYDDWAQRLRLVLAHQEALIDFPDEELPQDVEDGLVAELSKLQIEMSAHLQDNRGELMRQGLTVVIAGAPNVGKSSLLNALSGTDAAIVTHRAGTTRDAIALDWVLDGVRLRLIDTAGLRETEDEIEAEGIRRALFHVKQADVVLHLIGPNESLESLSGQEIPVRTKIDIAPTPPGMLGISTQSGEGLAALRQVLSERVAELMAGSAAPPLTRARHRAGIQEAATHLERARTATWPELRGEELRLSMLALGRLTGRVDVESLLDAIFGQFCIGK

SEQ ID NO: 198 - protein, 612 aa, Gluconobacter oxydans
MVIGGGHAGCEAAAAAARFGARTLLLTHRLETIGAMSCNPAIGGIGKGHLVREIDALDGLMGKAADRAGIHFKLLNRSKGPAVHGPRAQADRSLYRAAIQDLLAATLNLTILEGAAGDLIEENGRITGVICEDGREFRCGAVVLTTGTFLRGVIHVGHTQTEAGRIGEAPAKRLGERLYALGLQMGRLKTGTPPRLAKNSIDWENLPADPGDAEPEAFSPMTAAITNPQVVCRISHTTAETHRIINENLHRSAMYGGAIAGRGPRYCPSIEDKVVRFAERTSHQVFLEPEALPGNPGGDLVYPNGISTSLPADVQAAMIATMPGLEKARIVTAGYAVEYDYVDPRELLPSLQLRRLPGLYLAGQINGTTGYEEAGAQGLLAGLNAARATAGNEALTLDRSDAYLGVMIDDLTLHGISEPYRMFTSRAEYRLTLRADNADLRLTPKGIAAGCVLSERAAAFTAQKAELDTAMTRAAETTFLPQTLRDVGFEVSLDGRRRTVLDVLASNGDHTKLDTLAPWFAELPLRVRRHVETEARYGGYLHRQDREIRQLASESAIALPADLDYSAIGGLSSEMRERFSQARPTSFAAAQRVRGVTPAALVALLAHVRTLS

SEQ ID NO: 199 - protein, 163 aa, Gluconobacter oxydans
MERKRRLRDIAPKETLPDVETHSEGFRANREARRNVLVEDYVELISDLLSEGQEARQVDIAGRLGVSQPTVAKMLARLATEGYVTQKPYRGVFLTPAGQDMADRARHRHRIVEAFLLALGVSEENARVDAEGVEHYVGSETLTLFEKALRGNLKQFMQALPDA

SEQ ID NO: 200 - protein, 651 aa, Gluconobacter oxydans
MRSGRGVFTRRALLVMAVQAGVLGVLGRRLYTLQVVDGGHLRQLAERNRTSKRLLAPARGTIHDRFGVALADNKVSWRALLMPEETTDIPAVIERFSQIVPLDEHDRARIERDLRHVHKYVPVTLHEFLSWDDMARIELNAPSLPGVLVDVGSTRLYPFRDLTAHIVGYVAPPNEEDVAKDTTLSLPGMRVGRAGIEQTQEAVLRGEPGSVEMEVNAVGRVIGEIDRVEGQQGEDVRLTLDSVLQQQVLNRLEDRVASAVVMDCRNGEVMAMVSTPSFDPSLFDSGVSHAQWNEWANDPRTPLVDKAVSGLYPPGSTFKPAVALAALKSGSVTAQDRFNCPGYYDLGGVRFHCWNRWGHGLINMREGLKYSCDVYFYEVARRCGMDPIQAVGNAMGLGVKLGIELPHVRSGVIPTPEWRQKHGFHWNGGDTVNAGIGQGFVQVTPLALATYVSRIASGRDVQPHLLRATNDQMSAMASVDDVAKVDLPPEYLDVVRGGMFAVVNDPHGTAPKARLDLPGIQMAGKTGSAQVRRVSRALRESGHFNSMNLPWEYRPHALFICFAPYDNPKYAVSVVVEHGNAGADEAAPLAKLIMTDTLLRDPASDVRPPAPSVAQTPSPVADGTAPAPTVPVLPDPAPAAPSEQTDPGAAQ

SEQ ID NO: 201 - protein, 349 aa, Gluconobacter oxydans
MFSRLLGLMSADMAIDLGTANTLVYVKGRGIVLDEPSVVAIAEVRGKKQVLAVGNEAKQMVGRTPGNITAIRPLRDGVIADFEVAEEMIKHFIRKVHNRRAFASPQIIICVPSGATAVERRAIQESAESAGARKVMLIEEPMAAAIGAGLPVTEPSGSMIVDIGGGTTEVAVISLGGIVYARSARVGGDKMDEAIISYIRKTYNLLVGESSAERIKIELGSAMMPDDPANPDGPLTEIKGRDLINGVPREVIVSQAQIAESLAEPVMQIVDAVTTALENTPPELAADIVDKGIVLSGGGALLYRLDEVLRLYTGLPVTVAENALSCVALGTGRALEEMRRLRSVLSSMY

SEQ ID NO: 202 - protein, 795 aa, Gluconobacter oxydans
MRFPALRRLFARLTSANGAVLLTVMALVLAFATFVVLSGGMSLAHRPQVQAIVFLLDFIMLMLIAAAAVVQIGRMLAERRLGLAGARLHVRLITLFGIVAVAPTIVVGAVATLFFHYGVEIWFSNRVNDALNEARSVAVGYLQEHNDNARTEAFALANTLITVQNDELFSRGTDLFHDPARLQEFLDDEVTERGLTDAEVFDPLTYKVLAVGGLLGSDADMTTAPPLPPKSVVELARHGEAVILDRPDQRRVRAVVALGGNSGLMLVITRPVDPDVVEHMRRTDTLVADYQRLITNRGKTQVLFAVIFALMGLLVLAVGMLTGLALANRIANPLGLLILAAQRISKGDLGVRVPVPDDAGQDKDDEVTGLSRAFNSMTDQLESQRSELMQAYDQINERRRFTETVLAGVSAGVIGLDRMQVIELPNRAASSVLQRDLQPAIGMKLTDRVPEFSGLLEAARMAPERVHTAEIQVDTEGAQRPGGPGEGAGAGAGRTLLVRVVAELRGQEVAGYVVTFDDITDLQSAQRKAAWADVARRVAHEIKNPLTPIQLAAERLKRRFLKEIHSDPETYTQLVDTIVRQVGDIGRMVDEFSAFARMPQPVMQPEDFSRLCREALVLQRNAHPEIVFETTGLPPSGPIVRCDRRLIGQALTNLLQNAADAISMAGRGKPGENASGQPVQPIGHIVVGLHIRSGHVLLDIEDDGIGLPTVERHRLTEPYVTHKAKGTGLGLAIVKKIMEDHSGMLQLTDRAPDQSRGASPGQRGTRVTLSLPLWEQESHVPGGTDLQTMRTADGT

SEQ ID NO: 203 - protein, 519 aa, Gluconobacter oxydans
MPVLASFARTSSRIRSEHLRSVLMGLFSVSMLSAAVDSAQAQSDPDPNSARHRVSRAAALSSPAPQNSETPANGGSNTPIMQNTVSGFAQTEGDPGPYFSAPMGSQHFLGDWGGVQPWLLKRGIHLMAAINEEFAGNFTGGKERAYSDAGQFGIELDIDWDKLAGVRNFWTHTLIVNGHGQSVSRNFGDSIAGVQQIYGARGNVVAHMVAMYGEMSFVHNRIDVSAGWIPVGSFFAASPLFCDFMNVAMCGNPAPNKYTEGNRDWPSGNLGAVVRAMPTMDTYIMAGLFAVSPHSYNGGISGWSWAQSGLGKFSTPVEIGWTPRFGHNQLQGHYVIGYSYDNSRYLNLYEDIHGNSWQLTGQPRRYEAGRNSAWLILDQMLVRNGPGNTNGLIAMAGAMYSDGKTVAMRDHEWAGLVDTGSAWGRPLDTVGAMYQHFDMSHTAALQQESSLALGLPYQDNQWGAVYGPQSHENVYELFYSAHIARAMALQPDFQYIQRPSATTTFHDAAVLGVQFTVVL

SEQ ID NO: 204 - protein, 285 aa, Gluconobacter oxydans
MTDNSTSQAVMVSPNDDFASAPEKVRKAPEAYRTISEVAEELHIPQHRLRSWETIYPGVKPFRGESGRRYYSPEHIETLRLISDLLYVQGYKGQGVLRVLRERRAEKARAAQKAVPETAPETVPEVSAVSAEAVHVPLVMVEATEENPAPVVDATPVTEPVENEDSPVTLTEASVDDIVFPEVPAAAHEVVVTETVDSTAENESPEAEAEAEAEAEAEAEAEAEAEAEAEAEAEAPDSALLVTLRDENELLFNTLEKTEAENSLLRSELREILEELRNLRNLLPV

SEQ ID NO: 205 - protein, 226 aa, Gluconobacter oxydans
MSSTLSPRSALDAEAVKTAYRRWARVYDTVFGGISGYGRKRAVAAVNALPGERVLEVGVGTGLALPSYSRDKRITGIDLSEDMLERARIRVLQDHLTNVDDLLEMDAEATTFEDDSFDIAVAMFVASVVPHPDRLLAELKRVVKPGGHILFVNHFLATGGLRLSVERGMARASRSLGWHPDFAIESLLPPEDLRRATLTPVPPAGLFTLVTLPQCESKSDAAALVA

SEQ ID NO: 206 - protein, 210 aa, Gluconobacter oxydans
MSGFQAQLILLSLISYVIGSIPFGLLLTALGGGGDIRKIGSGNIGATNVLRTGRRGLAAATLLLDALKGAMAVLIARFFFPGASETTMAVAAVAVVIGHCFPVWLGFRGGKGVATGLGTIWVLSWPVGLACCVVWLLVARLSRISSAGALAAFFIAPVLMVLLSGRTLHSPIPVATLLVSLLIWVRHSSNIARLLTGREPRVNVDPASRR

SEQ ID NO: 207 - protein, 304 aa, Gluconobacter oxydans
MIDVIVLGAAAGGGFPQWNSAAPGCVAARTRQGAKARTQASIAVSADGKRWFILNASPDLRQQIIDTPALHHQGSLRGTPIQGVVLTCGEIDAVTGLLTLREREPFTLMGSDSTLQQLADNPIFGALDPEIVPRVPLLLDEATSLMNKDGIPSGLLLTAFAVPGKAPLYAEAAGSRPDETLGLSITDGCKTMLFIPGCAQITAEIVERVAAADLVFFDGTLWRDDEMIRAGLSPKSGQRMGHVSVNDAGGPVECFTTCEKPRKVLIHINNSNPILFEDSPERKDVERAGWTVAEDGMTFRLDTP

SEQ ID NO: 208 - protein, 746 aa, Gluconobacter oxydans
MASNSLSKPAPWRKPSSAGTRVSVLVPLPFPGPLDYLAPMPLEPGELVTVPLGRRETVGCVWETDRTLPADFALPVGREVPLARLRPVAGKLDVRPLPQSLRRFIDWVAAYTLTPPGLVLAMATRIHLKDAPRPTLGWVRTEMPEGDLRITPARRSVLNFASSTPMTTAELGSRSGASAAVIRGLATAGLLREAVIAVAAPFATPDPSHGAPKLSEEQAEVAQELCGPVEAGRFQVTLLEGVTGSGKTEVYFEAVAACLAKGKQVLVLLPEIALSAQWTDRFIRRFGAEPAVWHSDLGAKRRRETWRAVAEGSARVVVGARSALFLPFSDLGLVVVDEEHESAFKQEEGVMYHGRDMAVVRARLADAPAILVSATPSLETLANVESGRYRHELLTARHGGATLPDVSLVDMRADPPERGLFLSPKLCTAIDETLEKGEQAMLFLNRRGYAPLTLCRACGHRMQCPNCSAWLVEHRARGILTCHHCGHTERIPKDCPECHAENSLVPIGPGIERITEEAKLRFPDAKLLVMSSDTLGSPAATAEAVRKISDGEVNLIIGTQIVAKGWHFPKLTLVGVVDADLGLGGGDLRAAERTVQLLHQVAGRAGRAEHRGRVLLQSYVGEHPVMTALVSNDFQTFMEQEAEQRRPSFWPPYGRLAALIVSAPSAEAADALAREIALSAPEREGVQVLGPAPAPLAVLRGRHRRRLLLRTMRGIAVQPILRQWLGDIKPTGGAKVDIDIDPISFL

SEQ ID NO: 209 - protein, 241 aa, Gluconobacter oxydans
MTQMTIGHLYTSLHAGCASAVARVLEAYEVEVEYVDLDPDDIEDALEGAEVDLLVSAWFPRDEKFAGPGRRVLGDLYQPVVSFAALLPLAAVGTLTSADVDRIIVSDDSRQALEDALKQLPALSVLPIESIGEGALIERLEKARDAGEKPLVVATQPHAVFHTDLLTVIEDPAHLLGGEMSARMIMREDVARQADSDLLDELSEMMLGNRVMSALDYVISVEGQDPEGAAEAWQRGRLIGR

SEQ ID NO: 210 - protein, 230 aa, Gluconobacter oxydans
MSEAEPIFTPVDTKSGSASLEIAEALRRAITNGILTDGQPMRQSELARNFGVSTIPVREALKQLEAEGLIAFLPHRGAVVTGLSEADILEYSDIRASLESMAAGLAMTSLTRVDLARIEDAYEAFVSGTGGTHGMEQSGRLNWEFHGAIYAAAQRPRLYGMIHDLHSRLDRYIRAHLELPGRKTATDAEHFQILQACRARDGEELGRLTKQHILEAASLSLDVIRNRTTP

SEQ ID NO: 211 - protein, 472 aa, Gluconobacter oxydans
MTDMTDLFGGAPEANRAPGHASARGPSRAPESMRQQRPIEAPQVQRRPPSRTQPLADRLRPRRLEDVRGQDHLLGPEGTLTRMLERGTLSSLILWGGPGCGKTTIARLLAGRAGLFYSQISAVFSGVADLRRAFEEADQKQAATGKGTLLFVDEIHRFNRAQQDGFLPYVERGTVVLVGATTENPSFALNAALLSRCQVLVLNRLDDASLESLLLHAEEEVGRPLPLDPEARASLRAMADGDGRYLLNMVEQLVALDPSKVLTPRDLAAILSRRAILYDRDREEHYNLISALHKSLRGSDPDAALYWFARMLEGGEDPRYIARRLTRFAAEDVGQADPSALPMAVAGWQTYERLGSPEGELALAQVVVHLATAPKSNAVYTAYKAARALARDTGSLMPPSHILNAPTSLMKDIGYGKGYEYDHDSEDAFSGQNYFPDGMPRASLYHPTDRGHEGRIRKLLDMRAAKRASREP

SEQ ID NO: 212 - protein, 134 aa, Gluconobacter oxydans
MKGPAGVSAHGPSTRQLRVAEEVRRVLAELFARTEFRDPELLDVRITVTEVRISPDFRHATAFVTRLGRSDVEVLLPALKRVAPFLRTGLSKALNLRTVPEIHFQPDTALDNAMELDEIMRSPEVQRDLNSKPE

SEQ ID NO: 213 - protein, 204 aa, Gluconobacter oxydans
MEDRPAPLPVPDAASLREAALAHLARFATTEQGLRQVLDRRLRRWGVCASRAGLPNEDIESTIAAVSPAIDGIVASMTDLGAVDDAGYARNRAVSLTRTGRSRRAVEAHLANKGVDQNTTREALNDSLGERSDSSAQEAELAAALVLARKRRLGPFQRPDREEEDPLKALGVFARNGFSRDVAQSVLDMDSDEAEDRIIAFRSL

SEQ ID NO: 214 - protein, 289 aa, Gluconobacter oxydans
MSVSSPASDVARNDAPHRQVSRDALRGSPAARAWADWKETRRLWRLGVRLGWLDIRLRYRGSALGPFWLTITSALMVASMGVLYSKLFHMQLASYLPFLSLSLTLWSVGFSSLIQESCTCFLDAEDMVRSVRLPFLLYAVRVVVRNAIVFAHNIVVPLGVFALYHLWPGMDALLAIPALLLWGLDGFAACMLFGSLCARFRDVAPIIGALLQIVFYVTPVIWMPQQLGPRAAYLLYNPFYPLLEIVREPLLGHVPSLQIWGIALATSAVFWLIAVRSFIRVRSRLVFWI

SEQ ID NO: 215 - protein, 965 aa, Gluconobacter oxydans
MRSDCTVPSTPHNLTFRLAKAAIVERRGVQFSMTKRMLIDTTHAEETRVVVMDGDRVEDYDVETSTKKQLKGNIYLAKVIRVEPSLQAAFVEYGGNRHGFLAFSEIHPDYFQIPVADREKLIALQEEEIAERGDAADDGETETVSEEATDSEDGENQDRRAPETVGGEHDTGEESASSRRTARFLRNYKIQEVIRRRQVLLVQVVKEERGNKGAALTTYISLAGRYCVLMPNALRGGGVSRKITSDSDRRRLRDVIAELDLPKSMAMIVRTAGAGRPAQEVTRDCEYLLQLWDDIRSHALSSVAPTLVYEEASLIKRVIRDLYSKDIEDILVDGEAAWKSAREFMRLLMPSNANKVKLWQNRGQSLFARYNVEGHLDAMFSPTARLPSGGYLVINQTEALVAIDVNSGKSTSQRNIEETALRTNLEAAEEVGRQLRLRDLAGLVVIDFIDMESRRHNAQVEKRLKEALRSDRARIQVGHISHFGLLEMSRQRLRPSIAESVLTPCPHCQGTGFIRGTESSALHVLRAIDEEGARQRSSEIEVHVGSDIALYILNHKRSWLADIERHHRMQVIFRTEENLAAADMRIERLQAQTPAPAQVRAPERAPEHVRTIEIIEEEAPVVVRTETPVVDAEIIEDVATSESEEESNGGRRRRRRRRRGGRREQNGDVPAAENSQEQDAPKAETREIAAPEAADENGIIPGRRRTRFKRVVKDTEGSEDTAAQPVSEVRDVAPTRPAATTRSSAPAPTRTPRRREDREERPAPRRYTGPTPADPFGGSFDIFDVIEQAELEGTTEALQTGISTPTEIVIEHVPAAETTIVVEEPVAEEAPKPRRGRGRRPARAKAVEAAPAETVAEEAPAAEAAPAPEEPVAEEPPKPRRTRTRRTPKAQAVEAEAPAEPTAEVAASPAETVSEEAVKPKRTRARRTPKAKPVEAQTTEEGNILQPVNVDEVAPTKRRAGWWKR

SEQ ID NO: 216 - protein, 396 aa, Gluconobacter oxydans
MRRNGMNTFGFLKSDRRLLRAEPDFRPMARLLQVNWLYVLLVCLLAGVGYIALYSAGGGSAKPFAGPQMVRFGFGLVMMIAVSLVSPRILRMASVPIYLLSVTLLALVLRMGHVGKGAERWINLAGMQFQPSEFAKIGLVLMLATWFHRIGNERMGNPLRLIPPALLTLLPVLLVLKEPNLGTATIIGVIGATMFFAAGMRLWQILLLVAPLPFMGKLIYSHLHDYQKARIDTFLHPEHDPLGAGYNIIQSKIALGSGGMWGEGYLHGSQGQLNFLPEKQTDFIFTMIGEEWGFVGGIAVITLLGTLVMGGMLIAIRSRNQFGRLLGLGIAMDFFLYCAVNLSMVMGAIPVGGVPLPLISYGGSAMLTMMFGFGLLMSAWVHRNERDPGEDEDEDD

SEQ ID NO: 217 - protein, 587 aa, Gluconobacter oxydans
MDIRSAKGTGIREYSIYMASATQTPTANHGTEDFAALLEETLGRDTGFDGSVVTGRVVRLTDEFAIVDVGLKSEGRVSLKEFGPAGVAPDVKPGDVVELYVERYEDRDGSIVLSREKARREEAWTALERAFANNQRVNGTIYGRVKGGFTVDLGGAMAFLPGSQVDIRPVRDVGPLMGQPQPFQILKMDRARGNIVVSRRAVLEETRAEQRSELIQGLKEGMILDGVVKNITDYGAFVDLGGVDGLLHVTDIAWKRINHPSEALQIGQPVRVQVIRFNPDTQRISLGMKQLEADPWENVAIKYPAGARFTGRVTNITDYGAFVELEPGVEGLVHVSEMSWTKKNVHPGKIVATSQEVDVMVLDVDSAKRRISLGLKQVQRNPWEQFEEEHKVGSIIEGEIRNITEFGLFVGLSADIDGMVHMSDLSWDEPGEAAMAHYEKGQVVKAKVLDVDPEKERISLGIKQLQEDPAADTLSRVQKGAVVTCVVTAVQSNGIEVKVDDVLTGFIRRAELARDKAEQRPERFAVGEKVDAKVVSVDRASRKLALTIRGREVEEDKQAINEYGSSDSGASLGDILGAAIRRRNTDA

SEQ ID NO: 218 - protein, 67 aa, Gluconobacter oxydans
MQVLVRDNNVDQALKALKKKMQREGVFREMKLRRHFEKPSEKRAREAAEAVRRARKMERKRLEREGF

SEQ ID NO: 219 - protein, 163 aa, Gluconobacter oxydans
MSETQERTGTLQDLASVAPAVTSNAAPVHEVKRDAQGRSYATGRRKDAVARVWIKPGKGDIIVNGRPVTTYFARPVLRMLLTQPFLIADRYNQFDVYCTVTGGGLSGQAGAVRHGISRALTYYEPSLRGILKAAGFLTRDSRIVERKKYGRAKARRSFQFSKR

SEQ ID NO: 220 - protein, 126 aa, Gluconobacter oxydans
MPNTYGSRTLTEWLTLLLGGVIILVGLYFVIAGGDLAMLGGSVYYVICGILLVAGGVFMVMGRTLGAYLYLGALAYTWVWSLWEVGFSPVDLLPRAFGPTLLGILVALTIPVLRRMETRRTLRGAV

SEQ ID NO: 221 - protein, 247 aa, Gluconobacter oxydans
MDHEVSSSALGAVGAAGLSPLDLFLHASIVVKLVMLGLLLCSAGVWAIIAEKIILIRRVNREATEFEDRFWSGGSLDDLYESDGARPTHPMAAVFGAAMGEWRRSARIGGIDLSRGGVRERVDRAIDITIMRENDRLTRRLIFLATIGPVAPFVGLFGTVWGIMHSFASIAQMHNTNLSVVAPGISEALFATAIGLVTAIPAYIAYNGLSNSFEKFADRMEAFGTEFAAILSRQSEERADDTTGGKA

SEQ ID NO: 222 - protein, 146 aa, Gluconobacter oxydans
MGMSAGGRAGGGGRRKRRPASEINVTPLVDVMLVLLIIFMVTAPMLTSGVNVDLPKTDASPVNSDTKPITVSLRTDGSLYLGDQQVTSDQLIDQLKAQSQNDPTHRIFVRADAHIDYGQVMQVMGQITSGGFTHVALLAQQPQSGQ

SEQ ID NO: 223 - protein, 108 aa, Gluconobacter oxydans
MSANTVAVSDSSFEADVLKSEGPVLVDFWAEWCGPCKMIAPALEEIGAEYQGRLKVAKVNIDSNPEAPTKYGVRSIPTLIVFKDGKPVAQQMGALPKSQLKAWIDQSL

SEQ ID NO: 224 - protein, 740 aa, Gluconobacter oxydans
MPQDLPSPTPEYLSRLNPEQRRAIETTEGPLLILAGAGTGKTRVLTTRFAHILLTGRAYPSQILAVTFTNKAAREMRERVSAILGEPAEGLWLGTFHAICARMLRRHAEYVGLTSSFNILDTDDQIRLLKQVMEPWKIDTKRWPPNQLMGIIQRWKDRGLTPDRVTPVEDSDFANGHALAIYRAYQERLIALNTCDFGDLMLHMTEILRNQPNVLAQYHRIFRYILVDEYQDTNTVQYLWLRLLAKREHGPSNIACVGDDDQSIYSWRGAEVENILRFEKDFPGAEVVRLERNYRSTAQILAAAAGLIAHNEGRLGKTLRPGRDDAQGEKVQIIGVRDSDEEARIVGGAIERLRGDGHPLSEIAILMRAGFQTRPFEERLMMIGIPYRVVGGLRFYERSEIRDCLAYLRVLSQPADDLAFERIINVPKRGVGAVAVQKLHAQARALPGPLTAAVIWQLQEGLLKGKSKEALDGLMAAFQRAKATLETEGHVVAAEQLLEDSGYLQMWRDDRSVEAPGRLDNIRELLRALGEFGTLQGFLEHVALVMDTESETSDDKVSLMTLHGAKGLEFDTVFLPGWEEGVFPSQRSLDEGGNRALEEERRLAYVGLTRARRRAIVLHAASRRIYANWQSSMPSRFIEEIPSEYVQLTGQAFETRRQAAAAPSMFASGPLTSTRPSGFRAPRPKIHDVKPEPTVAIGATVFHHRFGEGTVIGADGPQLHINFENGGVKRVMANFVEIRS

SEQ ID NO: 225 - protein, 317 aa, Gluconobacter oxydans
MSSTFDEHLIGQSSGKAPAGAAATIIDADQTTFMADVVEASREIPVLVDFWAPWCGPCKQFTPVLEKVVHAAGGRIRLVKVDVEANQALAAQLGQLGLPLQSIPLVVAFWKGQVLDLFQGAQPESEVRRFVESLLKLAGDVMPATEILAAARQALADGHADQAAGLFSQLLEAEPENPEAWGGMIRALIALNEPEAAQDASAQVPAKLDSHPEITGARAALALHAEGAKAASELETLRQQSAAAPDDFDLRVRLAAALNGAGERAEAANTLLDILRKDRNWNEGAAKTELLRFFEAWGHTDPDTLAARRKLSSLLFS

SEQ ID NO: 226 - protein, 59 aa, Gluconobacter oxydans
MTTELDPRLLSLLVCPVTKGPLTYDRETQELISPRAKLAFPIRDGIPIMLPEEARQIDA

SEQ ID NO: 227 - protein, 268 aa, Gluconobacter oxydans
MKPPRSRSGSSKDTGPKRIPGKALKSASNPGENDATLDSATARTARNKTVSLRTARGRTTAQQRWLNRQLNDPYVAAARKQGWRSRAAFKLIEIDDRFKLIGEGTRIIDLGAAPGGWTQVAVKRGAQHVVGLDLLPVDPVAGAEIIEGDFTDPEMPDRLKDMLGGPADLVMSDMAPNTTGHAATDHMRIMGLAEGALDFAFQVLAEGGSFIAKVFQGGSEKDMLALMKTAFSSVKHVKPPASRKESSELYVIATGFRPERLPEGGKGA

SEQ ID NO: 228 - protein, 187 aa, Gluconobacter oxydans
MVRINSPLKPFSTDAFRNGEFLTVTDSDVRGKWSVFFFYPADFTFVCPTELEDLADNQAAFDKLGVEIYSVSTDKHFTHKAWHDTSPAIGKIKYTMLGDPTGAIARNFDVLIEEAGLADRGTFLIDPEGKIQYIEITAGGVGRSATELLEKIQAAQYVATHPGEVCPAKWKEGGETLKPSLDLVGKI

SEQ ID NO: 229 - protein, 489 aa, Gluconobacter oxydans
MEHFQQVEPFDYVIFGATGDLTMRKLLPALYNRLRMGQIPDDACIIGAARTELDREAYVARARDALERFLPSDILSPGLVERFLARLDYVTLDSSREGPQWDALKSLLAKAQPDRVRVYYFATAPQLYGSICENLNHYGLITPTSRVVLEKPIGTNMATATAINDGVGQYFPEKQIYRIDHYLGKETVQNVLALRFANPLMNAAWSGEHIESVQITAVETVGVESRAAYYDTSGALRDMIQNHLLQVLCLVAMEAPDSLEADAVRNAKLAVLNALRPITDATAATETVRAQYTAGVVDGENVPGYLEELGKPSTTETYAAIRAWVDTPRWKNVPFYIRTAKRSGKKVSEIVITFRPAATTMFGASPASNRLVLRIQPNEGVDLRLNVKNPALDVFNLRPADLDTSIRMEGGLPFPDSYERLLLDAVRGDPVLFIRRDEVEAAWRWAEPILDAWKNDKAPMQTYSAGSYGPEQATQLLASHGDTWHEASE

SEQ ID NO: 230 - protein, 335 aa, Gluconobacter oxydans
MTDLHDTLLTLDSHIDIPWPDRQDAWVEETPRQVNVPKTRKGGLRAVCLAAYIPQGPRDEAGHAEGWERVQGMLDVIAGLEGRQGDQGARVCRTAADVRAAYKAGELAVIPAIENGHGLGGRPERIAELARRYGVRYMTLTHNGHNALADAAIPRKDLADNETLHGGLSDLGRETIAKMNRSGVLVDVSHAAKSTMMQATEVSITPVFASHSCARALCDHPRNLDDEQLDRLKETGGLIQVTAMGSFLKKGGGGTVEDLVRHVSYIADRIGVEHVGISSDFDGGGGIPGWKDATETANVTQALQAAGFSDTDISSIWGGNMLRLLETAERAAEKV

SEQ ID NO: 231 - protein, 887 aa, Gluconobacter oxydans
MTRRSFRSRNPQGSGNPQGPGAPPPRPPRFRRYRQSLAIIAGVGLVGIAGAGVLGWTTYAKLVADLPSVDSLRAYQPPTVSRIYASDDRLMAELANERRIFVPINAIPERVKNAFIATEDHNFYTHGGVDFMAIGRAGLTDIFARHGRRPLGASTITQQVAKVMLLNSNVLSFDRKIKEALLAMKMEQVLSKDKILEIYLNGIYLGNGAYGVAAAAQSYFNKPLDQLDDAEAASLAALPKSPTNYNPFLHPQAAMARRNLVLDLMVEAGVLTRQQADQEKQEPLVPQQKQRFGPLPDSEWFGEEVRRQLIAQYGQERAAQGGLEVHTSLDQSLQVTETRLLHEGLMNYDRVHSGWRGPLRNLPDIQDDGWESALDHITPPGGMLREWRLAVVLPGATHVGWIEEGTARKGALLATDMAWARRMRPLRAGDVIMIEPQEGGSAALRQIPQVEGAAVTLDVHTGRVLAMVGGWSFHESQFNRVTQALRQPGSSFKPFVYLAAMEKGISPSERFDDSPVSYGDWHPQNYEHDNWGPTTLHDALRESRNLVTIRVAAHLGMKAVADTAIRAGLVAQMPHVLPAALGAVETTVMREAAAYATIANGGHIVTPTLVDDIQDRAGTVLWQAGGLTLGTAMQAPPAEQPVPADGTTTSAAPATAPVAPSATPTTPPPGSVAVPALTDGRPVLASEQSTFQIVKMMQDVIARGTGRMAGVGIDRPIAGKTGTSQDFHDAWFAGFSPDIVTVVWVGFDTPQTLGRNSDGGRVAGPIWNRIMKVALANRPKLDFRVPDGITLASYDTGRISAVDGFKTDQVPGASVELHGFGAGTEALTAADTGADSVISDSESDMAQTPGQGGGMAGAAPGSGTAAAPGQAQKPAPSDGDIGVGGLY

SEQ ID NO: 232 - protein, 293 aa, Gluconobacter oxydans
MTPLFRSLAVIGPGLIGSSVLRRARETGAIAETLIAADSNPGVLERVRELGIADITTSDPAVAAQADCVMICVPVGAVEPVARQVLPFMKPGSILTDVASVRGQLGPTLAAILPENVAYVPGHPMAGTEHSGPDAGFSTLFEDRWALLVPPEGADPKAVTTIGQLWTLCGARTKILSDEKHDRICAMVSHLPHLLAFTICDTADNLSDEIRAAVLDYAASGFRDFTRIAASDPVMWRDIFLANKEALLGTLDKFVADTQAMADAIRTGDEATITSKIERGRAIRRTLIENRQA

SEQ ID NO: 233 - protein, 273 aa, Gluconobacter oxydans
MPSVPSVLLAGCGKMGGALLDGWLASPTPPRLVILDRHRTGTDDAITVVRTAAEIPAGFKPDVIVLAVKPATAEIMIDAIGKALGPRMSNAAILSVMAGRTCAALSEAAQLAGADMPVLRAMPNTPSAVGAGISGLYASPSATPEQKSICHDLLFAVGDVVPVEKEADLSIVTAISGSGPAYVFLLAELLEKAGQQHGLSPTIARRLARGTIYGAGRMLDDLPDSAEDLRKAVTSPNGTTAAALAVLMKSDAWPETVPKAIDAATKRADELAG

SEQ ID NO: 234 - protein, 244 aa, Gluconobacter oxydans
MKLSHTEALASMQAALGHDFKKPELLSEALTHRSAVSGRDPRRARRNQRPKGSGSNERLEFIGDRVLGLLMAEWLLERYPDEQEGALGPRHAHLVSRTVLAEIADQVGLSASLQISPHEEDAGIRRLSSIRADAMEALLGALYLDGGLEPARRVVRQYWQSRIESADRPHKEPKTLLQEYMLSQGLPLPHYELLSSDGPSHAPVFRVSVTTMGHTGTGEAGSKRLAESAAATALLKHLGQNVAS

SEQ ID NO: 235 - protein, 285 aa, Gluconobacter oxydans
MRDFTHDHSALALNTATLGHNMLGAGAGWSAERTIDACAERGIGGIVFWRPELQGRASAIGQHARQVGVEVVGLCRSPFLVGPLAPHGRQAVVDDFRRSIDETADLGGKILTIVVGGVEPGTKGVRESLDIVTDRLSEVLDYASERDVKLALEPLHPMYGGDRSCLPTVRDALDICDALNSDTLGVAVDVYHVWWDTDLPRQLERAGTRIMGFHLCDWLVPTTDFLLDRGMMGDGVADLKGLRAGVERAGYDGFCEVEIFSANNWWKRDPAEVLDVIIQRFRDIC

SEQ ID NO: 236 - protein, 1091 aa, Gluconobacter oxydans
MTTSVQHSLKRRTPAPRTVIRMFLMAGISYSVLPSFGAHAQTTDATKHAAVHKTAAKKKTAAKQQVMPAAKNTPATTPVAAAAPAAKPATTTSVQTSNRTTLTTDPTPVAETVTVTGTRLSQTRLTNVMAGTTVDAEQLRARGYTDLGLALLRENTAFTVGDNSPIGSQGSFGAGQSFIALLGLGSQRTLTLIDGMRMVGGSTASNYGAGSGSQVDVSTIPTSLIKKIDTKLGGAGAAYGADAVAGVVNYQLDDHFKGVDFNAQGNWTQKLDAPQEKITFKAGTSFDHDKGGVVFDVEYRNSGGMVANDRRYLTGDQATTYARAPVGSTSPYSYVLTPAVRFLQNSVTGVPMTSAAYGSLPLTYGQASQYGIANASGAGLMFSQDGKSLVPITTNAALKDGLRGSGGNGLALTDYNQLYAPSSKLNLTTLGHYDFTDHLHATWQGWYARGTASSLTAQGTWNTPQFDDPLSAESYQQDTVVNGAYTLSTSNPYLTSAERTAIKSALAAAGQSTDTFYLSRLNQDLDAGNYTTTVQMFRFQGGLNGDFDAVGRHFDWSVKGEYSKYMSDTWEPMIDTQNLVNALNATTDASGNIICTPGYTNSTAKTRSSTCSPLDPFGYDQMTLGAKNYITADAHSKESNVQRDIQAEIHSTVFRLPAGDIRWDLGYEHRREGYDFNPGSFMEGEEQADGTYKQYGNFTSIPYTGGAYHTHEVFGELDVPFVSPSMHIPGIYNLSATANGRYINNSVTGSYWTYMFGGAWWPTQDFGLSGNYAQSVRNPSVTELYSPTSTSYETANDPCSVEYISSGPNPATRAANCAKGGMAGGFESNINYYTLPGTTGGNRNLKNEVSKSFTGNLEIRPRFMKGFDFTGSFVDVKVNNEITSLDASDLMAACYDSTSYPSNAYCNAFTRDPSTHQVTSFTDGYFNIANQHMQVLQAKLDYYIPLRRFGLPSSAGNLELQGNYTHYVKNQQTYLGSTYLLTGSTTSPNNLFTLDLNYTRGPLFVQWQTVYYGKSKYALQVSDYTYQHNNRPDFAYFNTTIGYKITKNFDVNFMMNNITNALPKYPGTVSLTRYYEAIMGRSFQMNLGAHF

SEQ ID NO: 237 - protein, 270 aa, Gluconobacter oxydans
MSRIQTRFAALKKEGRGALIPYLQACDPDYDTSLELLRAMPAAGADLIEIGVPFSDPSADGPTIQAAALRGLKAGATLGCVLEMVRAFRETDNETPIVLMGYLNPIDSYGPAEFCFDAAQAGVDGIIVVDMPTEEADLLDAHAREAGLDIISLVAPTTSNSRLFHVLRDASGFVYYVSITGITGTNSASAADLEKALPRIREATSLPVAVGFGISTPEQARTASRIGDAAVVASALIKTMAGTLDDGRATERTVPAVLKQLEGLAAAVRA

SEQ ID NO: 238 - protein, 255 aa, Gluconobacter oxydans
MVPNLSDPDLPARILVVEDDAGMRTLILRALQGGGFRARGVACGDEMWAALEVAPVDLIIMDIMLPGKSGIELCRALRSGQGATHENETPPAQVPIIMVSARGEERDRVNGLESGADDYVPKPFGQRELLARVRAVLRRGIATGAPQERVRRETLRFAGWTLDLRRRELTDPSGATVDISGAEHDLLTSFLDNPQRVIARDRLLELSRTRLGDVSDRSIDVLVSRLRRKLGSDADQLIRTVRGLGYIFVAEVERV

SEQ ID NO: 239 - protein, 299 aa, Gluconobacter oxydans
MSTAETMMSQMAEKGGFIAALDQSGGSTPGALKQYGIPESDYSGESEMFARMHEMRVRIITAPSFTGDKVIGAILFERTMDGDVKGEPVPAYLWRERGVVPFVKIDKGLEAEADGVQLMKPMPGLDDLLERAVKLGVYGTKERSTIRLPSESGIRAIVQQQFAVAEQVRRHGLVPILEPEVLIKSPDKKACEQLLHDYVLEELQKLPEDARIMLKVTIPEVPDLYDDITRDPRMVRVVALSGGYPLDQACEKLRHNHRMIASFSRALIGDLRHQMDEAQFDATLGKTIDEIYDASVHKV

SEQ ID NO: 240 - protein, 747 aa, Gluconobacter oxydans
MSGSTISSGQPTPDNTTTRPAPLRPRARPFLSWLYAPSPSSVTFALRNTIAACLAVGIAFWMELDDPAWAAMTVWAVAQTSRGESQSKAKWRIVGTISGAIAAITIMAAAPQAPWMFFPMIALWIGLCSGFATFVSNFRSYALVLAGYTCSIICMGAASNPDNVFMVAMSRGTYIVLGVLCEAFMGLIFATSQERHARAQLRQKLESALVLVTTTLCSLLGEERGALNAARRQFGTILTINDQIEFAEVEMGPHGHEGDHARAALAAVSALLSRGFGMAMRLQVLNHNHPAFTKTADEILAFLKQFPQRLPDQNAVPALLADLQHFRDICRLYAAPHRESDIRPDLEPIPGLEPFDQTDEGQGMRADRLDERILFVSLGELLGDLEQAIKEYEASTHRIKGDHFHFQLETHRDTREAVHNGLRGACAVLITAYIYEVTAWPNGLGFIAITTLVCGLFATKENPVLGTTEFLKGAVAAYFMAWILVFVLMPKVTTFETLALFLGPAMFLGGLAKGNPATAGGSAAYGLLLPAMLGLENHHVMNEIAFYNGNMATVLAVAVSVIVFRSVLPFSSDAERFRLRRIMLGELQRLAHPGFTPRISVWIGRNTDRFARLIRHAGPTPAPLIEACILGTLATLTLGLNVIRLRTLLDREYLPESARRPILLVLHYVEQSTKRHDKAARIAEAAVRRLRVLDAQETDLVTRLELTRAITYLVVIAYTMRTNEDFLDASKPFRGERNSRLLNSGQG

SEQ ID NO: 241 - protein, 600 aa, Gluconobacter oxydans
MTDTPLSLIRNFSIIAHIDHGKSTLADRLIQACGALTAREMKNQVLDSMELEQERGITIKAQTVRLTYPAKDGKVYTLNLMDTPGHVDFAYEVSRSLAACEGSLLVVDASQGVEAQTLANVYQALDANHEIVPVLNKIDLPAAEPERVRAQIEDVVGIPADDAVEISAKTGINIEGVLEALVQRLPAPTGDAEAPLQALLVDSWYDAYLGVIILVRIKDGRLKRGDRIRMMQTGATYHVDQVGVFLPKMQSVESLGPGEMGYINAAIKTVADCNVGDTVTLDKRPAEKALPGFKPSIPVVWCGLFPIDADDFEKLRDSLGKLRLNDASFHFEAETSAALGFGFRCGFLGLLHLEIIQERLSREFNLDLIATAPSVVYKMHMTDGTSEDLHNPADMPELSKIETIEEPWIKATIMVQDEYLGPVLTLCSERRGIQVDLTYVGNRAMAVYRLPLNEVVFDFYDRLKSISRGYASFDYQMDGYEESDLVRISILVNHEPVDALSFISHRTVAEQRGRSICAKLKDLIPKQLFKIAIQAAIGSKVIARETIGALSKDVTAKCYGGDISRKRKLLDKQKEGKKRMRQFGKVEIPQSAFLAALKMD

SEQ ID NO: 242 - protein, 358 aa, Gluconobacter oxydans
MSRVSPGVVSGASYTALIRACHEGGYALPAINVVGTDSVNAVLEAAARNGSDVIIQVSNGGARFYAGEGLPDAHRARVLGAASMARHVHLLAKEYGIAVILHTDHADRKLIPWLDDLITMSEDEFKATGKPLFTSHMLDLSTEPLEENLATSASMLKRLAPLGMGLEIELGVTGGEEDGIGHDLEEGADNAHLYTQPEDVLKAWELLSPIGTVSIAASFGNVHGVYKPGNVQLRPEILKNSQEAVQKATQSGPKPLPLVFHGGSGSTIAEIDAAVSYGVFKMNLDTDIQFAFAHGVGSYVLEHPVAFQHQIDPGTDKPMKSLYDPRKWLRVGEKSIVERLDEAFEILGSKGRSVARKS

SEQ ID NO: 243 - protein, 217 aa, Gluconobacter oxydans
MSQTIVPHTLPLKNVHVPARDRTATRAPGRPVNLRLKDNILAAIAQVLVEEGYQGLTISRVAKAAGVSTATVYRRWPTKQAMFFDAMRLWRDDLTPQIDTGSFAGDVDELIAARIRFLVTPLGRTYGTLLGEAVHDPEFGQVLWEVSVVPARAQMTLFLERASRRGEKVFCQNPDTVLDMLLSTIHFRAMNLLGREPMDADSTLKEIRSLARSLIAG

SEQ ID NO: 244 - protein, 308 aa, Gluconobacter oxydans
MHDAAVQAATGQIRRTEEGTAPAPVVCTFFDEATNTASHVVHCPVTKRAAVIDSVLDYDAAAGRTSHGSAQAIVDYVEREGLTVDWQLETHAHADHLSAAPWLQEKIGGKLGIGADITRVQAVFGKIFNAGTRFARDGSQFDHLFTDGETFRIGDLPVTVLHVPGHTPADMAFVIGNAAFVGDTIFMPDFGTARADFPGGDPRQLFRSIRRLLSLPVETRLFLCHDYKAPGRDEYAWLTTVGHERDYNIHVHDGVSEEEFVKMRTERDATLAMPRLLMPSVQVNMRGGHLPEPEADGVSYIKIPVNRV

SEQ ID NO: 245 - protein, 233 aa, Gluconobacter oxydans
MPKTRAMTRNEIYEEILWKSSPGLTAYPEALTFMEERARAIHQGTAAPLVWLVEHPPVFTAGTSARDTDLYNPHGYPTYSAGRGGQWTYHGPGQRLGYVMMDLTKPNGTVPPRDLRAFVAGLEGWMTGALAQLGVTAFTREGRIGVWTIDPLTGLEAKIGALGIRVSRWVSWHGVSINVSPDLTDFDGIVPCGIREFGVTSLQRFDSSLTMADLDDALAAAWPGRFGSIPRAA

SEQ ID NO: 246 - protein, 243 aa, Gluconobacter oxydans
MIVIPMAGLSSRFTKAGYTKPKYMLPLAGKSVFAHSIESFSAYFGLIPFVFIARPVADTEAFIRKETAKLGIKDVRIIILDHETAGQAETVELGVRKAGLGLETPLTIFNIDTFRKNFRFPDEPWFKKSDGYLEVFKGEGANWSYVGPEENSNEPLVARTTEKKPISDLCCDGLYHFAHTRDFLDALTQERLTPSASELYIAPLYNYLIKAGRKIHYNLLPADMITFCGVPAEYTALLNAIED

SEQ ID NO: 247 - protein, 209 aa, Gluconobacter oxydans
MTTDAEQDGPLRQRKKDRTHAALVREAMRLFSTHGYEETSVDEIAEAAQISRRTLFRYFPGKADIILAWTGSVTTILTEAIRDVPLDVPLQDAVLAGLVPVVACYSSDRMDAYAVVRLVERTPALRDMALRRYSEWEETLASALIARLPATEMPSLVARLLARTAIATFRTALDEWMKTEGKSDLEAILRQTFTLQPLLWQDDFPLSSG

SEQ ID NO: 248 - protein, 190 aa, Gluconobacter oxydans
MNNASSPTPQSRTRLLRRFAQAGVACVPLLLGGCSFFSPIPEPRGSLIEKTDYAQLVPGTSTRTDVLDLLGSPTAHATFDDNTWIYVSMITSPTPLTFPSVKKQQVVVLNFDNGGVLRKMDTLNKKNAMYVGMVGAKTPTPGTSSSILQELLGNVGRYNPMSGMSSQFGGSTGPMGGQGTGNGGAGNTLP

SEQ ID NO: 249 - protein, 454 aa, Gluconobacter oxydans
MRERDDAWQKLDRPLRRILPRSLMGRSMLIVLIPLLVTQAIALGLFYGTYLNVVSRRLSDGVTGEVSLVIAMIEHTSSEAERTLVLQDASSRTQLGFSFQPGETLSRYGTNHVLGPMDDDFARSIRQNLGRPYDVDWSESPQTVRASIQLPQGVMVVMVPVKRLNIGPIWLFVVWAVSSSIVLFLIAGLFMRNQVRAIRRLGHAAELFGMGRDQGPIRPQGAREVRQAAIAFNRMQARVNRFVAQRTAVLAGVSHDLRTPLTRLRLTVAMFPTFGPIRAETLKPDLADMVADIEDMERLIGSYLSFARGEGAEEPVLTDLRGMLDDVAAATVRAGGQVLGVEGREGVEATVRPDALRRVLTNLAENARRHGGAMRFSLREGERNVEITVEDNGPGLSASRRAAISELNGTTASQDGNSGLGLTIVRDIIHAHGGSIRLVESPLGGLGVVLSLPK

SEQ ID NO: 250 - protein, 472 aa, Gluconobacter oxydans
MAHRQHQISTPDATQARRVSSRLPASLMASVASGLLLGACSWIPGSHLVGISETSAPAGGSIGTVVADEPQAALVGHDVLARGGNAADAATATALALGVTLPSRASFGGGGACLVSRPGEVAQSIAFQPRAGTSKGADRPAATPADFRGLYLMQLHYGTVDFNDLIAPALNLASTGITVSRTLAADLAAVRPALLADDSARAIFGRGDASTLVAGDSLAQPRLAGFLERIRVAGVGDLYNGALADVYVTAAQKAGGGLNDDDMRQTLPLQTEALITRQGGVDASFLAPPADGGLGAAVRYTTGASAQGTVAAWRASGNTSLAAAQAALNSGRSGGGSLPALPASTSFVVTDHSGMAVACVLSDNNLFGTGRIAGSTGVVLGASPAHTPQPLLSAAVLRDQRNLRAVIAASGQNEAADAVGDAARAAAHETPIPHEGAGRINAILCHGNDSCRGSTDPRAAGLAAGTTNDSRN

SEQ ID NO: 251 - protein, 334 aa, Gluconobacter oxydans
MLNDNLPHFDGRHYRNPEAWRPDETRTARTTSQRIGNIFRWQMGLRPRWPDALPPQKSWPQVTPAPGECCVTFIGHATVLLQFGRTGRAPLRIITDPVFSERCSPFRSFGPRRVRPPGIPLDALPRIDIILVSHCHYDHLDLPSLRALAERDDPLCLSLPGNRRHLEKADLPRIAELDWWESTTDDGARITATPALHGSARTPFDSNRALWGGFTIEADGHTVFFAGDTAWGKHFDAIHRRWPDINLAILPIGAYDPRDLMRRVHMSPEEALMAFDTLRAKQGLPIHFGTFQLTDEAILEPPTRLEFASRPGSRPFAALENGESLTLPPADTKS

SEQ ID NO: 252 - protein, 78 aa, Gluconobacter oxydans
MGIAGASCVLDVMINDRSALVRDSAAFIVLLERIWKARDVEASLVWSELDERIRLADELRASGIRPYKGGRFRSTKLP

SEQ ID NO: 253 - protein, 360 aa, Gluconobacter oxydans
MQHPVLTILPPRERYEEGHAGAISLLVSREAQFSDVVAGMGRIGTPLPGGQYRPLILPRVPLLRNWRLRLACVAMMRFCRPALTEIHNRPDLARFLARFGPVRLILHNDPCTMRGARSPRQREDLARHVLVCGVSEWVTGRFCEGCGPIRTEVQPNCIDLSVLPTVGLRQKIVLFAGRVVADKGVDAFVRAWGAIRAQYPGWRAVIMGADRFGPDSPETPFLEKLRPQAAAVGIMMTGYRPHDDVLEAMAGAAVVVVPSRWEEPFGMTALEAMGCGAAVVASPVGALPDLVGDAALLAAPDEAGALEQALSRLMGDEGLRTRLGERGRERAALFDVAAARVRQEELRRAAIAFARRPPRL

SEQ ID NO: 254 - protein, 539 aa, Gluconobacter oxydans
MHIVPRSLVARTSLLLIVGLAVVEAAGLGIHALDRFDLEERSQVHEEQVQVFSIYRTVAEAKPADRHDAIDDLHVPSNVTVLLLKEPDPLIEGHEIPFPAMTSPSFLHRLHEDPQGHEGFLPPGPMDPGGPHPGPDMGGPGFPGAGPGPMGPMGGGPGGPEFHFPADHADGERADAEHLNGDPRFPGAIRRRDMPPFMRWALLPSSLYPRKVLIGQKMRTHSTSILLPDRDCWLVVRFVTPLPNPFGSPTFMIAFLVMSIAGSAMIVWATQRLIAPVTTLANAAEALGRDVHTAALPENGPSEIRRAAIAFNTMAMRIRRFVTDRTLMLTAIGHDLRTPITRLKLRAEFIDDEELRNKVLADLDEMESMVSATLAFGRDSASAEPIVSLDLRALLQTIMDEAAESVPDKADDLFYEPPNVPVRIKARSVALKRALNNLILNALKYGGSAHVTLIPATNPGEKDNVVKILIEDNGPGLPESELDRVFEPFVRIESSRNRETGGSGLGLSIARTILHGQGGNVRLENRPSGGLRVIVTLAP

SEQ ID NO: 255 - protein, 528 aa, Gluconobacter oxydans
MPPRDRRTRPTVDRRRALVGLGLAAPFLASRSIAAEKSVPCLRIDEVELRRFGAALDGITDDLHVLQACIDSSGVNTPDVPCPSILFDFPAVTVCLSGPIVTGGRNITLRGAGQDLTVLIMKTGASGILTHGTSEYPAEGYLQLQDIGFDDGNIKGSGCTGISVHFAPGAPQAAMTWQGVALRKWSQAATITNCPRNWHCENVTVFGPDFTMQDDAGFRIISEPHFAQGCFTYVFINVLVANYSWGWDYSISAPLEGQRFYSCTCYNGWGMVRSRVHATPDQQSGIDETYRSVIWYFMECDWQGFGYALDLVHCRNIIVRGGFYIANRNVDHLPIPEGRVRRRYMSFVDCGDILLDGVKFDVFTGSEPDLALIYVDGRSDNFRARDTNILSYAPIYCAFEFADPSHPNLKRNTLSEIDTLWASWSGGEKVRDAGGNQITQTSVRDLGGDMTSGGRISFQGHVTLSRGKSMIAFPHRQNGNSWFSKTPIVFLQTEGTEDVPKLLNVTSDGISIEVTSNSAAIMWQATGT

SEQ ID NO: 256 - protein, 1173 aa, Gluconobacter oxydans
MEQNETMTREMSTASVGRSFGPTVWGVPDGSVAFLLRQRLAEHDGPLLHVARDDAAVAALADMLAWLMPEVEVLRLPAWDCLPYDRVSPNPVLIAERAGTLCRLLEPTKARRIVLTTVHSLIQRVPPRSAFRGQSISVKTGESLDQAMLIELLIANGYTRTDTVMEAGEFATRGGIFDLFPAGESDPIRLDLFGDEVENIRAFDVGTQRSTETLKRFELRPVSEFSLGPDSISRFRTGWRDSFGPAATSDTIYENVSDGRRYPGLEHYLPLFHDGDGHQMETLLDYLPGGAVSFDHHAPEILKARLDMIADHYQARRVPTREGEIPYRPLPPHRLYLDAHGWESMLADVPSVILNAFAMPDTAQGVDAGYRPGPLFARAKDGSRAGMFEAFGQQVKTWAEAGRRTYVTAWSRGSRERISHLLAEHGVTATSYEDWPDAAGMPKGTTGLLTLGLERGFVSDRLCFVSEQDLLGERISRPPRRRKRGEQFISQVGEIAEGDLVVHSDYGIGRYVGLETVVEGRVAHDYLSILYDGEQRLLLPVENIELLSRFGSEQAGVQLDKLGGTAWQARKAKMKSRIRVMAGELIKTAAARALKDAPTLAPAEGLWDEFCARFPFVETEDQSRAIADVLEDMSAGRPMDRLVCGDVGFGKTEVALRAAFVAALSGMQVAVVVPTTLLARQHFRSFSTRFEGFPVNVAQLSRLITPKEATKVREGMADGTVDIVVGTHALLAKTVSFERLGLLIIDEEQHFGVAHKERLKALREDVHVLTLSATPLPRTLQLSLSGVREMSLIATPPTDRLAVRTFITPFDSVMIREAIQRERFRGGQIFCVVPRLADMDRMAERLTEIVPDAKTVQAHGRLTPTELERVMTEFADGKYDILLSTNIVESGLDMPSVNTIIIHRADMFGLGQLYQLRGRVGRGKQRGYAYLTWPQTRPLSPSSEKRLEVMQTLDSLGAGFTLASHDLDLRGAGNLLGDEQSGHIKEVGIELYQQMLEDAVIDMRRERGKRQDDEDSWTPTIILGLPVLIPEAYVPDLPVRLGLYRRIASLTNEAEVEAMRAELVDRFGSLPPEVGNLLDVVLIKRLCREAGVERLETGPKGMVIQFRRNRFANPAALIDWVARKKESGVKIRPDHKLAVIREMTNATRIGYAKKVTTVLCKMIRKLEAAKSGD

SEQ ID NO: 257 - protein, 323 aa, Gluconobacter oxydans
MTAAAQFSPLPQWPLYGLTDDLFPTLERWSAEGKRAALATLVSITGSSPRPLGSEMAICEDGEVQGYVSGGCVEAAVRAEALESLKDGQPRMLDYGAGSPVLDIQLTCGGRIGIFVRALPDLTAHVATLKAARENRRPITLLTDLDTGAMQFCPEARATGLEGRTFARQYLPPLRLILSGGDPITLALLSLSALMGLETTLLRPYGPPGPPPGLSPTRYIRGSLDAALPTLSLDRWTAVYSLTHDAFADLTLTAHALKSEAFCVSILGSRRKIPGRLEALRTAGVPEEAFSRLHLPAGLEIGARTPMEIALSILTQMITTRPR

SEQ ID NO: 258 - protein, 483 aa, Gluconobacter oxydans
MKKEKSAIVLFVKDEAHDIMAWLSWHISLGFDKIFVYDDHSTDGTYEIAKSCEGIYNVEVCRTSMLEGNFYYRQRDSYFDAIKKSIDHYEWIAMLDGDEYVSIDGTQDINGFLDKFRKDDTGIALSWCIYGSSSRVLKDKVPTYQVFNHRSTPELNDNTLVKSFVRPEAVSFVYENPHKFNLSYGNYADAAGQPVEWRPGATKNILWEGARINHYICRSMEHFIDCIKRRLGSDLSNSTVYWSHFDRNDVYDPQDQARINAANTVYNNIKKSVFQYSMKNFLEKGNALENTENSLTPHRKVDLFHLKSIHGEYLSLNNIDGHLFQGEGFERILAAIPYDSNKIWLFRNPFVYSSNVRFHISHSAQSNYCYEFAFDSNESDGSIFIQSPKTQKYLTCIPVGHGGSVEFSREEASDWEKFYFGEKVSELTFVGDNEGPASDLIYYMLNSAGSFPYEEFLLKSSTLESNDRMNLKSLLGPQIMSII

SEQ ID NO: 259 - protein, 901 aa, Gluconobacter oxydans
MRDDPRETLTESYRSAARLNGLRAEHLQKENQKLLRQLFLIQTSLSWRVTLPLRAVRALTFGRLLSGRPVSELPGRFLRLWGREGLAGIRKTVIHRVRRLKRIHGDRQKVSTASTAETGGLHPYRATPECGAARLKPQVLIIAELSLRQCAKYRVWQKRDFLQTLGWSVQVVDWRDLAEAQSALQLCTHVIFYRVPGFDDVMKLVQEAHRLGLAPRWEVDDLIFDEGEYRQNGNIDTLPAAERDLLLSGVALFRRCMLACGRGIASTAALAGAMREAGLTDVAVLENALDAQTLGIAEVLPLPVPSGRIWVSYGSGTNTHDADFRQAEAGLLAAMDEEPRLCLRVIGQLQLSSAFSRFGDRVERLTELTYPDYLKALSQTDIAIAPLEKTLFNDCKSNIKFLEAAIVRVAAICSPCAAFLTVLRDGKNGLLAADTAAWRNGFLALARDGDYRKRLAEAAYKDVMARYAPKAMAQTQARALFGLPPSREAEGLRILMANVYFAPRSFGGATIVAEEMGRRLVRKGVQVSVMTSRPPAVDIPDGDVRYDVDGMMVFASVLPDGLDGVGHLDNPAMASRFADMLDACQPDVVHVHAAQGLGTGILRICQERGIPYVLTLHDAWWLCERQFMVKGDGRYCFQTTIDPAVCQACVPGVRHLADRTVVMRQALAGAALLISPSHAHRELYLANGIAPERIVVNRNGFCWPKRARRPRSPGTPLRFGFVGGTEAVKGYGLLKEAMQSLSRSDWELVVVDNKLNLGFQSIFPEDWTVRGKLRVVPAYTQASLDDFYDQIDVLLFPSQWKESYGLTVREALARDVWVVTTSPGGQSEDVVDGVNGTWLPLDGKPQTLVQAVSALLEAPERFEGYVNPYKEQLATYDMQADELYGFLKRAAGQPSGRGAGL

SEQ ID NO: 260 - protein, 58 aa, Gluconobacter oxydans
MDLLRWTIAFLILALCAAVLGFGGISADFAYIGKILFFIFLVLLIISLIFGRGRGTRL

SEQ ID NO: 261 - protein, 299 aa, Gluconobacter oxydans
MTQDSYPRDMIGYGRTPPDPKWPNGARIAVQFVINYEEGAENSVLHGDAGSEAFLSEMVGTKSIIGARCAQMESLYEYGSRAGFWRLRRLFDEAGMPVTVFGVAKALARNPDAVAAMKESGWEIASHGLRWIDYQDFPEDLERAHIRKAIALHTEVTGERPLGWYQGRTSPNTARLVAEEGGFVYDADSYADDLPYYDRSNGRAQLIVPYTLDANDMKFAALNGFTEGEQFFIYLRDAFDMLYREGGRMMSVGLHCRLAGKPARAMGLLKFLEHIRKHEDVWVATRLDIARHWLSVHPA

SEQ ID NO: 262 - protein, 172 aa, Gluconobacter oxydans
MMSRIQLTVLRPLHRPTTRLALGFLALGALAACGSGRDPSTLTAPRNHLLGVDRGAEGGADELRGGVNAYLWRGAIDTLSFMPLASADAVGGVILTDWYQPSASQNERFKIAAYVLDRRLRSDALRVSVFRQVLQDGQWEDTPVSATTTSDITTRILTRARQLRAENGERDN

SEQ ID NO: 263 - protein, 361 aa, Gluconobacter oxydans
MSGEFPVDQILRGECIETMKTLPDGSVDCIFADPPYNLQLRGELRRPDETVVDGVDDDWDKFADYATYDNFTREWLSEARRILHKDGTIWVIGSYHNVFRLGAIMQDLGFWILNDIVWRKSNPMPNFRGRRFTNAHETLIWAARGPQSKYRFNYQAMKALNDDLQMRSDWYLPLCTGNERLKNEHGLKLHPTQKPESLLHRVLVASTNANDVVLDPFCGSGTTPAMAKRLGRHYIAIERHPDYVKAARERVAREERLTSEQLATTPAKREMPRIPFGSFVETGVLPAGTLLYDRQKRLKATVTPDGTLVSGNQRGSIHKLGAMLTNAPSCNGWTFWYFERDGQYVQIDVLRQESQALRNVG

SEQ ID NO: 264 - protein, 599 aa, Gluconobacter oxydans
MPLVTPNMPRVVLVEPDCDHARQIVQVLVKEGFALTCATSGEEALGTIEETMPDLVVACTELPGMSGGQLARRLRLDALTRNIPILMLTEDASPGVEREGLESGADAYISKSAHPDLMVLRMRALLREGPELLQVDEASRLRRARIVIVNSPREDEDEEEVVEDVPETTLGELLWRDGHTVTSIERSDDLIEGGWLRGADSPDCLVLELGSGDEDLKFCRLLDARRQAVLEAGGIPFRTLGIVEASRFRRQSSGEFFEAGIDDLVPSDIALEALAMRIRTLAQRRMAQDEFRQQEIERQQNALTLEAARAKAEMAEALAQANMELARTNERLLQVQSKLVQTAKMASLGELVAGIAHEINNPLAFTIAHADTVTRTLKRLQGVNASDEAMSLTKKGMSRLESMKLGLQRIQNLVLSLRRFSRLDESSFQKVDVPAALETALALLAHKLGPGIIVQKDLQAPAELVCQPAFLNQVVMNIISNAADALADMSTDGDIVRGRIVIASRLENGRYEMRVSDDGPGLPPDLRTRIFDPFFTTKPVGTGTGLGLAIAYSVMEAHDGVIEVTDANLPDGRGIGACFRMSLPVRMTEEGPVATGRAA

SEQ ID NO: 265 - protein, 148 aa, Gluconobacter oxydans
MKLFELGERTAQVHDVLVTVAELAERDDARAVLLESADDPALLKPYLNRLDLVVLRFPVFRDGRGFTQARELREYLRFSGEIRAEGHILPDQAAFLRRCGVDSVVLPKDGNGDPALWEKQLRQFPVAYQRSVLPERSVGPGLRVEEAS

SEQ ID NO: 266 - protein, 144 aa, Gluconobacter oxydans
MTRIILQHGQNAPLTLDIEEGSTTPIHLHFSQALPVAAPQPEIAPVGPQAAPASKIRRFLPVAATAAVCAGLLFTFGGPRASAPAMPESAPLPPLPSSGPLETQPQGPAPTAPQQILKALHQPAHVEMPPSAPAQAGSPFGLEN

SEQ ID NO: 267 - protein, 124 aa, Gluconobacter oxydans
MTQGVAEEMANSESQTPKALLAAVILMGVLIIAAVFGLIGVIAYRFLHPRPSVTATVPLAEGGFSRLALPLGAGEHITAVTSRPDGLMAVTLSGAGSDRVLLWNPEAGKIAAELDFGTPAQSTP

SEQ ID NO: 268 - protein, 207 aa, Gluconobacter oxydans
MPDYALEAAHGGLVVGIDEVGRGPLAGPVVASAVAFTAPPSETLSSLLDDSKKLTARRRMLAYEALMADEQALIGVGAASVAEIERINIAQACYLAMRRALSRLGCTPDLALVDGKHAPKLPCPIKMVIGGDGISLSIAAASIIAKVTRDRLMARLAVRHDAYGWERNAGYGTAAHLQGLKLRGVTPHHRRGFAPIRNMIEAEAHAA

SEQ ID NO: 269 - protein, 304 aa, Gluconobacter oxydans
MTSFLYRAETLLVRALLAAIRTLPPAASSSLGGFVARTVGPLLPVSKVADRNLQLALPEYDASARRRIVRDCWENLGSTVGEFPHISRLKQNTPSGAGWSVEGAEHLEAARASGRPVIFFSGHIGNWELMPPVVARYGMPFASFYRAASNPGVDRLIHRLRQDAMGQDVPMFPKGAKGARAALKYLSKGGNLGVLGDQKMNDGIEARLFGRPAMTASAAAVFALRHDALIVTGHVRRDGPARLVLVVDAPFMPTKTDDRAKDVLVLTQLFNDRLESWIRDIPGSWLWLHRRWDKSLYRNMTTQC

SEQ ID NO: 270 - protein, 398 aa, Gluconobacter oxydans
MSELLSVTRAMELVLDYAGSFGTETVDLTMAAGRILRQTVRAERAQPPYDRVMMDGIAFRHGSGPTLVSHGIQRAGASGQVLPEGHVCLEVMTGAVLPDGADTVVPVERLVREGRLIRFEEGYEPRKGQFIHRRGSDCAAGTELLAPGQRLDGPALAVLAGNGHAQVSVSRIPSIGIVATGDELVDVSAPVRDWEIRRSNEYALTGAMLSRGFNCIERSVVPDDLAETVVALREQLSRHDVLILSGGVSMGAFDHVPKALSKIGVERVFHKVAQRPGKPLWFGVGPEGQRVFGLPGNPVSATTCGVRYVMPMLLAGQGLCRPEPYTVMLDAEADLIPTLTRFLPVKLRHDATGQALATPCPMPTSGDFSFLASTDGFMELPRGEGVAPRGTAAMFHGW

SEQ ID NO: 271 - protein, 380 aa, Gluconobacter oxydans
MIYLDYLSTTPCDPAVVKAMLPWFGEDFGNPHSPHGPGRKAAEAVERAREIVARLLGVEAREIVFTSGATEANNLAIKGAVRHLARVGDPRRRIVTLATEHKCVLESVRDLESEGFEAVVLGVDSEGRVDPEALRDALKVPTLLVSIMAANNETGVLQDIPQLAQIVKERDALMHVDLAQMAGKMPVSLRNVDLASVSAHKMYGPKGIGALYVRRKPRVRLEPLFSGGGQERGLRSGTLATPLVVGFGEAADLAAETMGDEAARQVFLRDDLWAQLREGLPGIVLNGAGAPRLAGALNVCLPEGCRALDVLEACPDVAASTGSACTAAEIAPSYVLTAMGLSAEKASRCLRLSVGRFTSKADIDRAASFLIAAARACHPN

SEQ ID NO: 272 - protein, 520 aa, Gluconobacter oxydans
MGKFGQDWTKALLTACAMTAVLPGITAVGHAQTTPAGVVDGHQKAAARTSTATMGTPQIRTKSISPVPLLVKPAPTKTGVETAAKTSDTTESRFFPASFHDWLTQSTMTGDWGGWRTWLTDKGINIGGHYLEDSAGNPMGGKTKAVRYADEFGINVDFNLKKLTGLNLGMFHTLITARQGLGIGATLPALDSPQQIFGSGETVRLTRLSWEMPWNKYVTTEVGEINTENDFEQSSVYWGMSQYCQFESNAICGMPQSIAMNSGYGWYPTAHPGAWVKFYPAGNDHYLVQFGAYSVDPVISNTHNGWKLNLHDATGTYLPFQLGWHQGGKDDYSGPLQTNIKIGGYWDTSEVSDVYSHLGTFGVPAQYLISAPSEKVRGRFGGWFQFDRMLQRDEADPNRGTTLFTSFTWGDPRTSVAPYFITWGVTRKGTFRSRPNDTISIGMKMLWVNPKLTNWVRQIQAAGGTDIYKPSGEHALELNYGWRPTPWLVIRPGAQYIWSTGGTNRYKNPLLLDFETGITF

SEQ ID NO: 273 - protein, 455 aa, Gluconobacter oxydans
MASLILMPALSPTMTEGTLARWVRKAGDTVAAGDVIAEIETDKATMEVEAVDEGVIGKTLVDEGTQNIAVNTPIAVLLAEGEDASAADNVVRSSDPAVGAPVAIETPSDPAITEAPAVAQAEDDRDWGETSEITVRQALRDAMAAELRRDEDVFLIGEEVAQYQGAYKISQGLLEEFGEKRVIDTPITEHGFTGMAVGAALTGLKPIVEFMTMNFSLQAIDHIINSAAKTLYMSGGQMGCPIVFRGPNGAAARVGAQHSQCFASWYAHIPGLKVVAPWSAADAKGLLRAAIRDPNPVIVLENEILYGQKFPCPVDEDFILPIGRAKIEREGTDVTLVAFSIMVGVALEAAAILADEGISAEVINLRSIRPLDTETIVRSVKKTNRIVSVEEGWPVAGIGAEICTVAVEQAFDWLDAPPARVCGLDLPMPYAANLEKLALPKPEWVVDAVRKQLRD

SEQ ID NO: 274 - protein, 157 aa, Gluconobacter oxydans
MDVSSSATAHLYLREDRIRQSYEAMMLAWRTLNADCEALLREKGLGPAHHRILFLTAAHPGITPGVLLNSLGITKQSLGRALGDLRERKLLIQEEDRHDRRKRPLRLTASGEALERELFLMIREVMTRAYREAGMTAVEGFRRVLAPLQVPAESRAR

SEQ ID NO: 275 - protein, 232 aa, Gluconobacter oxydans
MSDEHILVVDDDPRLLRLLQRYLSENGYRVSTALDAQTARDVLQRIQPDALVLDVTMPGEDGLSLTNSLRRDGLSLPILLLTARGEPADRIGGLEAGADDYLGKPFEPRELLLRLRAHLRRMVPSLPAVDEVPDVLRLGELEFDVKRGLLSGPQGAVHLTGGESALLGVLTRQPGTVLSREAIARALEMDEIGERAVDVQVTRLRRRIEADPKEPRFLHTVRGKGYVLKPGR

SEQ ID NO: 276 - protein, 404 aa, Gluconobacter oxydans
MVLVCVALAGWVLAVWLLLRQPRVPTSPPDDYLTPVSPADLPVDPLPACAVVLDGLGAIVQVNEEAASQFGETVGAILRHPAARAALSAALRAPVPASPSGSSNRGDLPPVCSTTFTLDVPVPRTLHLMLRRLPGGKGQDRRVLVVLTDRSEAQAADRMRMDFVAHASHELRTPLASLSGFIDALQGAAGENPVMRQQFLDIMRQQSERLKRLIDRLLYLSRVQAHEHQRPRDVVDVADLMAVVLGEVAPRFEQEGRTLKLEIEDDLLVRADEDEMVQVLLNLIENALRYGAQEGDPLTITLSARRAASPDDRWPADGGVILGIEDNGCGMEAHHLPRLTERFYRVGAPTDGAGQGTGLGLSIVRHILDRHGGRLRIASAPGKGTTCLVWLPPAGATLAVSMVE

SEQ ID NO: 277 - protein, 290 aa, Gluconobacter oxydans
MSETVVSTTGWKPNPRAARRRRADHLATAFGMVMAGILVLVLASILWTLLSRGLAGLSAAAIMKPMGPPGSSSGLANAIVGSLIQTFMALLMATPLGLGCGIYLSEYGTETNKFASCVRFVSDVLMSVPSILVGLFVYQVLVAPFGHFSALAGSVALAILAVPIIVRTTEDMLRLVPTSMREAGAALGATRWRVTLSLCLRSAKTGVLTGILLALARVSGETAPLLFTSLGNQNWSFSLNRPMASLPVTIYQYAGASYEDWVQLAWAGALLVTMGVLAINIAVRVSARRG

SEQ ID NO: 278 - protein, 268 aa, Gluconobacter oxydans
MIQDSMMTETDPQVAKSPEVALAVRNLNFYYGENHALHDISIDFPARRVTAMIGPSGCGKSTLLRVFNRMYDLYPGQRATGEVIFDGRNVLERDLDLNILRARVGMVFQKPTPFPMSIYDNIAFGVRLHEKLNKADMDARVQDVLTRVALWNEVRDRLNAPASGLSGGQQQRLCIARSIATRPEVLLLDEPTSALDPISTARIEELLDELKEEFTIAIVTHNMQQAARCADQVAFFYMGRLIEVDSADRMFTNPKQQQTQDYITGRFG

SEQ ID NO: 279 - protein, 326 aa, Gluconobacter oxydans
MTLATATQPEEARDKAGVSHSGSRRSGPDTAFHLLVAASALLVLVVLGGLVVLMGVGGSQAFRTFGLGFAFHDVWNPVADQYGAWAPLFGTIVSTLIGVAIALPLAFGTAFWLTAMAPPRIAAIVGTAVQLLAAVPSIIFGMWGFFTIVPFMARTVQPFLTHHFRHVPGIRFIIHGAPFGTGLMTAGLVLAVMIAPFMTAVMRDVFAAMPAMLRESAYGLGATRWDVMWKVVVPWSRTGMIGAIVLGMGRALGETMAVTFVIGNVTAVGWSLFAPRSTVASLIALQFPESPAGSLRLSALLALGFILMLLSFASLALARMLRGDTK

SEQ ID NO: 280 - protein, 342 aa, Gluconobacter oxydans
MIKSRAPLFGLLVATALGTAAMTPFVSSAKAADITGAGSSFAAPIYGAWGTAAKSQAGIAVNYQSVGSSAGQDQVIARTVDFGASDKPMSGDRLAKEKLYQFPTVMSGIVVVANVPGIAPGQLRLDGPTLAGLYDGEITTWDDDRIKALNPGLKLPDTDVAPIHRADGSGTSYVFTSYLSQVSPTWKQKLGAGTSIAWPGGSGARGNDGIAAMVRQTEGGVGYVEYSYAAQNHLNIAQMKNHSGAFVAPTLASFAEAAKAADWVHADHYAVNLLDTDGASSWPIVTATFVLVPVDAAQKESGKAVRNFFAWGFQHGDADNARLDYVGLPQNVKTDILANWPK

SEQ ID NO: 281 - protein, 379 aa, Gluconobacter oxydans
MTPKITRFLAEQQPATPCLVVDLDVVGAHYRALHDALPEAKIYYAIKANPAPAILDRLVALGSSFDVASPAEIRMCLDAGAAPDRISYGNTLKKAEWIREAHDLGISLFVFDSIEELEKLAKHAPGARVFCRLAVENEGADWPLSRKFGTTLSNARALMLRARELGLKPYGLSFHVGSQQTGVAAYDHAIAKAAGLYHDLRAQGVDLQMLNLGGGFPTHYRENVPSVQDFAHTIHTSLKTHFPDGAPEILLEPGRYMVGQSGVVSSEVILVSRRGGALTDPRWVYLDIGRFGGLAETEGEAIRYTFRTSRDSEDAARSPCVVAGPSCDGVDIMYEKNRIPLPDSLECGDRVEILATGAYVSTYCSIGFNGFPPLTEYYI

SEQ ID NO: 282 - protein, 457 aa, Gluconobacter oxydans
MSKTHCIASTALAALLAFSAALPATAAPHHKADPKAASKTAATKQEAPPAKPPEDQILAVINGQVLTQRDVDNRAKLFVLSTGLPISPEIMNRMRGQIIHQLIDERLKTQEILKLHINVEPDQIAGAISNIEQRNGMPKNALRDRLASDGVSLTTLIDQIRVQIGWMQVLREKLGEEGRITATQISQREQALQAEQGRAQYFMSEIFVPVADPRHDENELAFTKTIISQLREGAPFPIVAAQFSQAQSALDGGSMGWVQEDNLDPQVVNIVRQMPIGAISNPIQVAGGFVIATVQSKRVVGKQMGTLLDLRQAFFPFDAPLNPQNPTEQQRAALQKATTAVQTVHSCDAMEALNKSLGEKRPSNPGSQILERLMPQMKAVLEALPPNRVSRPLVSMDGIALLMVCNRQQKNLAQQSPSEIADQLMNERVEQASRQLQRDLQRRAIIEMRPAAKTAFN

SEQ ID NO: 283 - protein, 413 aa, Gluconobacter oxydans
MSLSLYRRLSARNLLLAGVFGIAALAGSAHADDVLGQAVGKDLQQAQSALAAKNYAKAMDAVDAADAVKGKTDYEAYTTAQMRAAIAAQSGNTDAAIKAYDVLINSSRTPKATKGQMLMAQATMAYSAKQYARAIPATERYLKEYGADPRMQTMLIQCYYLQQDWKGTAKAAQEQVDATIKAGKVPAENQLQMLATAYTNLKDADAKTHAYVLLAKYYSKPDYWSMLIHDLVANPNLSPPLVFYVERLRLATGVLKDPSDYQDMGERAVQMGLPQLALNLLNQGYANHSLGNGPTAAADAKFHAFVAQQAATNRSQLASAVTQAASAPNAGPALTAGYNQVLNGQVDAGLALMKTGLGKNPRYPDLAQVEYGMAQMDGGQKAEAIKTFASVQGNGPAKDVAELWSLLLSRPTK

SEQ ID NO: 284 - protein, 898 aa, Gluconobacter oxydans
MTDVVVVESPAKAKTINKYLGSGYTVLASFGHVRDLPPKDGSVRPDENFAMSWQTDERGAKQISAITKALKGAKNLYLATDPDREGEAISWHVRSVLEEKKLLKNVDVHRVTFNEITKSAVTAAMAAPRELDRPLIDAYLARRALDYLVGFTLSPVLWRKLPGSRSAGRVQSVALRLICEREAEIEVFRPKEYWTVTGGFTTPGKAAFQARLTHLKGEKLDQFDLNNEQLAFGARDTVLGGQFTVRSVERKRTKRNPPPPFTTSTLQQEASRKLGMSAQTTMRTAQQLYEGVDLRGETTGLITYMRTDGVTMAKEAVGAIRGHIGKAFGDEYVPDYPRSYSTKAKNAQEAHEAIRPTDVFLTPQQVAHALTPEQKKLYELIWKRSVASQMQSAELDQVAVTLADASGQTLLRATGSTIAFDGFLKLYIEGRDDTKAEDEDGKLLPPMKEGDRLTTGTVDAEQHFTQPPPRYSEASLVKKMEEIGIGRPSTYASILGVLRDRNYVRLDARRFVPEDRGRLVTAFLTSFFERYVDTGFTASLEEQLDDISGGRADWHDVMAAFWHDFSAAVAQTKDLKISDVIDALDEDLGPHFFPPRPDGADPRVCTSCGTGRLGLRLGKFGAFIGCSNYPTCQFTRRLVAEEGDSEGLNDGPKVLGQDPETGEDISIRRGPYGLYIQRGEPNPEDKKAKPKRTTIPKGIDGNTMTMEQALGLLSLPRLIGLHPETGEKIEAGLGRFGPYVKMGAIYGTLDKDDDVLTVGLNRAVDALAKKLASIRNLGPHPKDGEPVMIRKGRFGPYAQHGQLITNLPKGQDMDEVTLDEAVALLAEKGKPLKGGAKKTSAKKAAPKAAKAKKAVAAAEGDEAAPKKVTKRSPAKSATKTKTTTPRKRKTVSDTSSEG

SEQ ID NO: 285 - protein, 476 aa, Gluconobacter oxydans
MSRADLRFSELFRADLFRTATFRLTLAFVVAIIAGMALQFGLVYGQMSGYEQQRSTDLLQREAALLVHETPAELEYEVRERSKTDLRVILNGAALFDMSRNRIAGDIKKWPVGLEVSPKTQRLWDAPPGDTPYEMRYLAVEVEGTNGNRDRILVLARSLHMANELRYITKRAALMSVVPVVAFALMAGIFLSHRALGRIKDMHEAIDRIMDGDLHERLPTGRERDDIERLAVSVNRMLDRLEHLLDEIRDVGNDIAHDLRTPLARVKARLERVSAITNDPAALQGAIERAALDLEQCFSVITALLRIGEIENGRRRAGFAMLDLRELLAGVVDLYEPIAETEGVMLEVVDSDKPVPLFGDKDLLNEVLANLVDNAIKFTPEPGTVRLSAGQGPDGATWLQVADTGIGIAEDERKAVMGRFYRSDKSRHVPGSGLGLSLVSAILRLHGASVDIVSAHPGQALPGAVFTIHFAPPASV

SEQ ID NO: 286 - protein, 459 aa, Gluconobacter oxydans
MTIRSSFAALLLATPAALSVGSAMAEPVAFEHARLIDGTGALAQPDATVVIDNGTIISVGIPAPAQVRHVDLTGKTLMPALISDHVHVGLVKGTGASRDNYTRANILAALKQYSDYGVLTVTALGLNRSPLFDTLRQEQHDGRNPGADLYGVDQGIGAPDGVPPAAMVKGVGPDQVFRPTTPEEARKDVDQMIAEHTDLVKLWVDDFRNDVPDGKTYPMLPPAIYQAVIDEAHQHGTRVAVHIHDLAVAKAIVASKADILAHGVRDQPVDHDLIAAMLRQGTWYIATLDLDEANYLYAEQPELLSNPFVLAGVNPALRRQFTDPKWRAETLAKPLTKASHYALSVNQKNLAVLYRAGVKVGFGTDSGAAPTRIPGFAEHRELYLTVQAGLSPVQAISLATGNAAALLHLSDRGVIAPGRRADLLVVNGNADENIGAVDQIDQVWQRGMLVSHGPVRSKN

SEQ ID NO: 287 - protein, 227 aa, Gluconobacter oxydans
MTLSVIHDKTTTLTGAPVAALLERLFAEAETATNPAIADIPREEFQRLAGSRTEYRKFYGLAKHLWLPVSRETGTLLYMLARATWAKNIVEFGTSFGISTIHLAAALRDNGGGKVITTEFEPSKVARARAHLEEAGLADLVEFREGDALQTLAAGLPESIDIVLLDGAKPLYPDILDLLEDRLQAGALIVADNADHSPEYLARVRSPAAGYLSLPFAEDVELSVRLH

SEQ ID NO: 288 - protein, 411 aa, Gluconobacter oxydans
MAKPLPVSPLARPLPDLATIAGVRLSAVAAGIRYQGRTDLMLAEFVPGTVAAGVYTKNACPGAPVLWCREALTTPYARALLVNAGNANVFTGRAGMQACEDCADATAQLLDCPPQDVFLASTGVIGEKLPQDRIIAALPAARAGLEENGWADAARAIMTTDTFPKAARRDVKINGTPVRIQGIAKGSGMVAPDMATMLAYVATDARLPQNVLQSLLASGCAQSFNSITVDSDTSTSDMLMIFATGLADNPEVDDVNDPALAEFTLALNDLLLELALMVVRDGEGATKLVRIAVTGADSNLSAHRIALCIANSPLVKTAIAGEDANWGRVVMAVGKSGEPADRDRLSVAIGGTWIAKDGGVVENYDEAPVVAHMKGQEIEIAVDLGLGDGQARVWTCDLTHGYIDINGSYRS

SEQ ID NO: 289 - protein, 213 aa, Gluconobacter oxydans
MIDFSSWHSLLATLIGLALFTLIGVGIRLLTMLTIQQRRERMNRQINERLRVLMAAYRTLGGSFTGTLLVDPTHKRDLEPDQLSGSDRNRRIRDAVEAALSDIILLGTEEQVRMAGRAAAELVAGRPVPTHDLVVSLRNFIRKALNLESLPSDLVLPEQGPARPSSSGGNKGDGKEGGKGGGGGGDGGGGGGMGMQGGMDPALHHSETDSHTL

SEQ ID NO: 290 - protein, 79 aa, Gluconobacter oxydans
MSPDNLALLIPIVAIIAWSVTSMVKHTTRQADPPGQPDPMLQAALTQAEAHATRLEERIDQLERILDEDIPGWRARNAR

SEQ ID NO: 291 - protein, 466 aa, Gluconobacter oxydans
MRYRSTRGELTADAPNFSDILLAGLAGDGGLYMPESWPRISPQTLREWRTLSYPDLAAEVIALFTEGAIDVDTLRDMTRDAYADFDHAAVVPLVEVEQDLYSLELFHGPTLAFKDMAMQMLGRLFDHVLTQRNRHVTIVGATSGDTGSAAIEACRGRERLSVVILHPKGRTSDVQRRQMTTVQDDNILNIAVEGDFDTCQDLVKAMFADHAFRDEVSLSAVNSINWARIAAQIPYYVRAALALGAPDREVSFSVPTGNFGNVLAAWAAKQMGLPIKKLCIGSNRNDILTRFVIDNDMSVRTVEPSLSPSMDIQVSSNFERLLFELLDRNSTRCAAIMREFRETGRMAVPHDAWTRMKEVFEGMTLTDEQTSEAMRLFYNESLYLADPHSAIGLAVGKRFQEPGIPMVAAATAHPAKFPDAVIAATGIHPKLPPHLSDLFERTERYECMDSQIAGLQDAVRAHIRRG

SEQ ID NO: 292 - protein, 190 aa, Gluconobacter oxydans
MIASQGPSMRRNRLSVARLSVQMGAMASVGLLLSGCSGADVSRAIGLERAMPDEYTVTTRAPLSMPPSEQMQLPGAADAHRPDESPRMQALETLSPDTALHPDAGQGSSGQTALVGQVDKSASAPNNAELGAADAGFVDNLMFWKGGNAGSVVDGDAENRRIRENSALGRNPATGATPTVRKKKAFLGVL

SEQ ID NO: 293 - protein, 138 aa, Gluconobacter oxydans
MPLRIEIVSPEKRLVEREVDMAVVPGMEGDIAAMPDRAPLMLQLRGGVVALYQGDKIVDRYFVTGGFADMGADHCTILADSAQLMSELSVDEAKSRLRDLESRWAEIGPNDVDMHDQISRELQSVRAELEAVQEHGPA

SEQ ID NO: 294 - protein, 178 aa, Gluconobacter oxydans
MTENETQLGLKPHFLVVMGVSGTGKTTVASGLATRLGWHFQEGDALHPPANVEKMSTGQPLTDADRAPWLALCHEWLRKQVEAGHGAVLTCSALKRSYREQLRGEDLPIEFVHIDTSVGELADRLQRREGHFMPASLLPSQLATLEVPGDDEPVIRVSGEKHPDVVLEELIRHFQAED

SEQ ID NO: 295 - protein, 279 aa, Gluconobacter oxydans
MTPLYGLILAGGASKRMGTDKAALDYHGKPQLQVAFEVLSPLVEKCFVSVRPDQTADPLRSSFPQIVDTVDVDGPAAGLLSAHRAYPDVAWLVLACDLPMLDRGTLDTLIAARDAGHVAVSYRSEHDGLPEPLCAIWEPEALDRLEKQVAGGRICPRKLLINSPTKLLEPHRRGALDNINTPEERDDAARRLKDLPGGPMIRLTLEYFAQLRELAGTREQSLETAFVTVGPLYEELREKYAFPFEASKLRVAINGDFAPWTQALKDGDHIVFIPPVTGG

SEQ ID NO: 296 - protein, 365 aa, Gluconobacter oxydans
MTALKTVSGTTYLDANATEPLRPCAKEAAVEGMMLSGNPSSVHAEGREARRFLEDARSRVAAGFGRISGTCVFTSGATEADAMAVHAFGQERRIFVGSTEHDAILRAAPEAEILPVNRDGILDVEHLRSRLQDTGPALVCVMSANNETGVLSPLEDVLAVCRDSGAHLHVDAVQSAGRLPFALGGCSVAVSGHKMGGPKGAGALLLAEDEPMDALVAGGGQERGRRGGTQALPAILGMAAAFDAARAQDWAPVQRLRDRVEAAAKSVGARVAGEAVDRLPNTSCLILDGVAAQVQLMALDLAGFCVSAGSACSSGKVSSSHVLRAMGETEGASQAIRVSLPWNVREAQVEAFCEAYEAMARRLRK

SEQ ID NO: 297 - protein, 310 aa, Gluconobacter oxydans
MSSKPDILTIDPLVPVMKERLEKSFTLHPYTSLENLKSIAPAIRGITTGGGSGVPSEIMNALPNLEVISVNGVGTDRINLDEARRRNIGVATTQNTLTDDVADMAVALMMTVMRGIVTNDAFVRAGKWPSATPPLGRSLTRKKVGIAGFGHIGQAIAKRVSAFGMEVAYFNSHARPESTCHFEPDLKALATWCDVLILAVSGGPRSANMIDRDILNALGKDGFLVNIARGTVVDEAALLSALQEKRIAGAGLDVFQNEPNINPVFLSLPNTVLQAHQASATVETRTAMAHLVVDNLIAYFTDKTLLTPVI

SEQ ID NO: 298 - protein, 364 aa, Gluconobacter oxydans
MGFNCGIVGLPNVGKSTLFNALTETAAAQAANYPFCTIEPNTGRVAVPDPRLDELARIGKSIRKVPTSLEFVDIAGLVRGASKGEGLGNQFLANIREVDAIVHVLRCFEDDDITHVEGGVDPVRDADIIETELMLADLESLEKRQVGLQKRARGNDREAQAQLELMEPLLAALRDGKPARTAVSKGQEAEASRLQLLTTKPVLYVCNVEEASAATGNAFSEAVRKRAEAEGAGVVVVSAAIEAEVSQLPQEDRTEFLEGLGLTDSGLDRVIAAGYKLLGLRTYFTVGPKESRAWTITAGTKAPQAAAVIHNDFERGFIACETVAFDDYVACNGEAGAKESGKLRIEGKEYVVQDGDVLLFRFNV

SEQ ID NO: 299 - protein, 212 aa, Gluconobacter oxydans
MSDDPPFLRDADQTRKNILEVALKEFAEYGLAGARVDRIARGTRTTKGMIYYHFGDKDGLYKAVLEKVYPSLRSDEEHLDVRNTDPVEALERIIDFTLDYHEKHEDFVRIVMIENINKGEHLRKTGIDSTVSYRIMMVIADILNRGMALGLFKREITPVDLHIFYTSFCFYRVGNHHTVSSVLGINMLSAQSCARHRRMVKDAVIAYLASSD

SEQ ID NO: 300 - protein, 563 aa, Gluconobacter oxydans
MTYTVGHYLAERLTQIGLKHHFAVAGDYNLVLLDQLIEQGGTKQIYDCNELNCSFAAEGYARANGAAAAVITFSVGAISAMNGLGGAYAENLPILVISGAPNSNDHGSGHILHHTIGTTEYSYQMEMAKHVTCAAESITSAEAAPAKIDHVIRTMLREKKPAYLEIACNISAAPCVRPGPVSSLHAHPRPDEASLKAALDESLSFLNKANKVAILVGTKLRAAEALKETVELADKLGCPVTVMAAAKSYFPETHPGFRGVYWGDVSSPGAQEIIEGADAVICLAPVWNDYSSGGWKSIVRGEKVLEVDPSRVTVNGKTFDGFRLKEFVKALTEKAPKKSAALTGEYKPVMLPKADPSKPLSNDEMTRQINELVDGNTTLFAETGDSWFNAVRMHLPEGAKVETEMQWGHIGWSVPSMFGNATASPERKHVLMVGDGSFQLTAQEVAQMVRYELPVIIFLVNNHGYVIEIAIHDGPYNYIQNWDYAALMQCFNQGVPGEESGKYGLGLHATTGAELAEAIAKAKKNTRGPTLIECKLDRTDCTKTLVEWGKAVAAANSRKPQSV

SEQ ID NO: 301 - protein, 586 aa, Gluconobacter oxydans
MCGIAGLSCLPGHHPDQDALERMSQAIFHRGPDGEGRLDLGGAALRHRRLSIVDIAGGAQPFRLGAAALIANGEIYNDPAIRRRFPKTCFQTYSDCEPPLHLWLHDGAGYTHELRGMYAIAIVENEHGRHEMVLSRDPFGIKPLYIAAYEGGIAFASEPQALLAGGFGKRSIRDSARDELMQLQFTTGQDIIFDGIRRLLPGETLRIVDGRIVESRRRHVLHEARDTVPARLSDEQALERLDTALLDSVSAHLRADVPLGLFLSGGIDSSVILAAAHRLGLPHPRTWTARFDAGKADESADAAALAASVGAEHHVLTVTEDMVWRELPSIVACMDDPAADYATIPTWFLAREARKDVTVILSGEGGDELFAGYGRYRRVMKPWWKGGRAPYRSGTFGRRFAEHGRQWRRGIAMTELALGVSGLEGAQALDIAEWLPNDLLLKLDRCLMAHSVEGRTPLLDPVVAKAIWPLPEHFKVRDGYGKWLLRRWLQDALPQARPFAPKQGFTVPVGPWIEKQAHRLGPLVARQPCIRAMMPAVDVERLFARASQRGVARQAWTLLFFALWHRHHIEGVPVEGDTFETLARAS

SEQ ID NO: 302 - protein, 351 aa, Gluconobacter oxydans
MTPDPHHDCACDHAHHGTTVPHEHHAHDHADHDHDDHHHDHDHCDGHSHGFGFGHQHVHAPASFGMAFAVGITLNTAYVAGEALWGVWAHSLSLLADAGHNLSDVLGLAGAWLAQVLATRPSSARFTYGLRRSTILSALANAMILLLVTGGIVWESVLRLFSHQNVQGEVISWVALVGIAVNAVTALLFMKGASSDLNVRGAFLHMAADAVMAFSVVIAGLLIAFTGYTIIDPIMSLIVSVSIVIGTWSLLRSSLDLALDAVPAGIDPDAVQAALLSLDGVSGLHHLHIWAMSTTETALTVHLVCDPTKPVSTDLVIARAAELVRTRFDIAHPTFQLETQPSVCDTHQPCC

SEQ ID NO: 303 - protein, 46 aa, Gluconobacter oxydans
MLASGIFQFLPAGVVTEKGVFSIHEKMNWRSCLWCRPLVRLGATTA

SEQ ID NO: 304 - protein, 423 aa, Gluconobacter oxydans
MSHPVSRRDFAVGLVAGVAAAGTGVAGAADPEKAVPTPPPPPKPVAKTICFVGGYTKHGPPGGGTGNGQGISVFDMDRDTGVLTPITTFTDIASPSFLAISKDQRFLYALSEIDDFNKDGDGSVTAFAIDPKTGSLRKLNVVSSKGAVPAHLSIHHSGRYVLVANYVGGCVAVLPIRSDGSLGEASDVVHNTGPRQPERASDNPQGNFAVSDHSGSHPHMIHSDPSGKFVLADDAGLDRVYVWTLNIDTGKLIPAKTPYYDMEPGSAPRHFQFNHSGRILYNLCEQDSKVVVSNFDPATGAINDIQTVSTVTSHFRGSTLAAEILISASGKFVYVSNRLGDSLAVFAIGADGTLTLQDEVWMHADYGRALMFDPSGAFLFCANQRSDAVTSFKVDKKTGEIAFTNNFTPVGSPTTFAFMNTQV

SEQ ID NO: 305 - protein, 434 aa, Gluconobacter oxydans
MGSYCGIHFDKLSICGSKSEVPGDWAALFQERDRRETRPTQEVGADPDLCVEYAASRDVILRRLSILGATDEAVQRAFETWLTEEQEQWRDNTEGWSDQEVISEHAAKMLKGLNGLTYQEWCRFASGALRIRYDFANYDRIQSDLASDPFRNQFHEPDDGYLWFAGYGSHLGLRALLDAVPDIKEVRLDISDLLGEYVDEHEPICSRARENAPCQLQMLAPTMVMAEGSSDLTALRLGLGAMHPDLMDYFSFFNHAELSVDGGAHYLVKFLKAIAAARSTSRILAIFDNDTVGIQAYEQARALKLPFNIIVTRYPDSDVAKAYPTVGRSGPAILDVNGQAAGIELYMGREALLSNGELRPVRWASYVASAGKYQGEVDGKRQVLEAFRKNIATVEGPEAARASFPDLERVWQHNFDLVQENSGLVYLRTGKRLA

SEQ ID NO: 306 - protein, 486 aa, Gluconobacter oxydans
MSSSDMIPNEGQPSGQSDEDFNQHVPRTATDPFAPNDMPLALLEFHSPTAGLINLPATPAARYIILLIGGLFLACLAVMALFPINRVVSTPGRLISTQPTIVVQPLETSIIRSIDVHVGDFVKKGDVLAHLDPTITEADITNMHLQRDAYQAEYDRLKAEAAGQDYHVNLNDPASVEQGAAFLRRKTEYQAHVENYAQQIASLESDIQGYRANAAMYGSKMRVASEVLQMRQREQADQVGSRLSTLGAQTELMEAERAEIAAQQSANSAEKKLAAMKAERDGYIGNWQAKIYSDLTEAGHHLAEYRSSYEKARLRQDLVLLRAPEDGIVLTIAQGSVGSVLQSAGQFITLVPTGYGLEMEAVLRSQDVGFVQVGDHALLKFATFPYDQYGGAEATVRVISADAFTPSSQNAGGGSNGNTPSDDATASGVYRVRLRIDRYTLHGQPSFFHPMPGMSLTADIDVGKRTVLQYLFNKITPALTNGMREP

SEQ ID NO: 307 - protein, 159 aa, Gluconobacter oxydans
MKFKVFGALGLALVLAACSNGNTNKGDSTGAGAVAQEAGPTPGSEADLVANVGDRVFYELNQSQLSEEARATLDKQVAWLAKYPQVSIQVAGNCDDRGTEEYNIALGQRRANAARDYLVAKGVSASRITTISYGKDRPTADGDDEQSWAQNRNAITSVR

SEQ ID NO: 308 - protein, 240 aa, Gluconobacter oxydans
MKGPSLARAKGLVLLVEDDPALLLMTCYNLEQRGYRVETAEDGEAALLALETARPDAVVLDWMLPGLSGLDVCRRIRANPALRDVPVLLLTARSAEQDAIRGLDTGADDYLMKPCSIDTLDARLRALLRRHQSSYDRLSFADITLDPETHRVERAGRMLSLGPTEYRLLDLLIRNPRKVFSREDLLRRIWGQNIHVEIRTIDVHIRRLRKAINGPGEVDLVRTVRAAGYALDDGPTTDGA

SEQ ID NO: 309 - DNA, 15 bp, Artificial Sequence
  Description of Artificial Sequence: Synthetic primer
gtatcgccgctcccg

SEQ ID NO: 310 - DNA, 20 bp, Artificial Sequence
  Description of Artificial Sequence: Synthetic primer
catcgccttctatcgccttc

1. Modified bacteria for use in bioleaching rare earth elements (REEs) from a composition comprising the REEs, the modified bacteria comprising at least one engineered genetic change that is correlated with improved bioleaching of the REEs, relative to REE bioleaching by unmodified bacteria of the same species as the modified bacteria, and wherein the at least one genetic change comprises a change that results in decreased expression, or increased expression, of at least one gene, and wherein the at least one gene optionally encodes a protein that participates phosphate-specific transport system signaling, or encodes a protein that participates in pyrroloquinoline quinone (PQQ) synthesis.

2. The modified bacteria of claim 1, wherein expression of the gene that encodes a protein that participates in the phosphate-specific transport system signaling is suppressed, and wherein said gene is optionally pstS, pstB or pstC.

3. The modified bacteria of claim 1, wherein expression of the gene that encodes a protein that participates in the PQQ synthesis is increased, and wherein said gene is optionally selected from the group consisting of pqqA, pqqB, pqqC, pqqD, pqqE, tldD and tldE.

4. The modified bacteria of claim 1, wherein, in addition to the at least one genetic change, the modified bacteria have been modified to increase expression of mgdh relative to expression of mgdh by unmodified bacteria.

5. The modified bacteria of claim 1, wherein expression of pstS is reduced.

6. The modified bacteria of claim 1, wherein expression of pstB is reduced.

7. The modified bacteria of claim 1, wherein pstS, pstB, pstC, or a combination thereof is reduced, wherein expression of pqqA, pqqB, pgqC, pqqD, pqqE, tldD, tldE, or a combination thereof is increased, and wherein the expression of mgdh is also increased.

8. The modified bacteria of claim 5, wherein the modified bacteria are Gluconobacter oxydans.

9. The modified bacteria of claim 6 wherein the modified bacteria are Gluconobacter oxydans.

10. The modified bacteria of claim 7, wherein the modified bacteria are Gluconobacter oxydans.

11. A method comprising contacting a composition comprising rare earth elements (REEs) with a biolixivant produced by modified bacteria of claim 1.

12. The method of claim 11, further comprising separating REEs from the composition.

13. The method of claim 11, wherein expression of pstS is reduced in the modified bacteria.

14. The method of claim 13, further comprising separating REEs from the composition.

15. The method of claim 11, wherein expression of pstB is reduced in the modified bacteria.

16. The method of claim 15, further comprising separating REEs from the composition.

17. The method of claim 11, wherein pstS, pstB, pstC, or a combination thereof is reduced, wherein expression of pqqA, pqqB, pqqC, pqqD, pqqE, tldD, tldE, or a combination thereof is increased, and wherein the expression of mgdh is also increased in the modified bacteria.

18. The method of claim 17, further comprising separating REEs from the composition.

19. A kit comprising modified bacteria of claim 1 the kit further comprising one more sealable containers in which said modified bacteria are held.

20. The kit of claim 19, wherein the modified bacteria are modified Gluconobacter oxydans.
